United States Patent Application Publication US 2026/0357256 A1 - sequence listing, part 3

SEQ ID NO: 9 - DNA, 58617616 bp, Homo sapiens (residues 4,342,047-6,513,069 of 58,617,616)
  source 1..58617616: mol_type = genomic DNA
aaaaaaaagaaaaaagaaaagaaaagaaaacaaaataataatatgggagggaggtggtaataggtgcattttagaaagagccctctggggcaatggtggaagaccgacagggtggggcatgagtttggaggcctgagactcactgcgatggccaggatttgggtgcaagaggctggaggtgtggctcagggttttggaaggcaggggacggaaaaaaagccaaagagaaagtgcgtaaggagttggggaaataaactgaggccggtttgggctatgctgagtctgcaggccttggggatgcccgttgttggctggacagtcagggtggggcccctaaagggtgcctgggctggacaacaatagttcacatgtacccagctcttgctctatgtcaagtcttcttcctgagaacattcccgagcaccctggagagcctcccccgcacccctactgtccagttcccacttcccgactgcggtctgggcaaagccacccgcacttgagcccatcccacggcgtcccggagctttaggaagtccccatcccggactttcaaccctgccagggactgagggaaatcccagagcctgggctccgggacgaaggtcccaggacagggtcggggatgtagttgcagaaacagggtaggggacaaaggccggggctgcactgatcaggcgcgcaacgagcccggccctgcctcctgctccgcccaagggtatggagggccggactcggctggccttatacccggagctgattggctggtgagtccagtccctgcctctgatggtttgcgctcataactaagggtttctactgattggtttacatggacgtctgcccattggtcaaatccgagttggtgtaatcagatagttgacacggattggttggtgcgggaatccagtagcttgctatcgattggttgagggtgaaataaatgggactcttatcattggctggcgggctccgcaacggtccaatcatggaatcagtcgagggccgcccgggagggtgggagttaattctttagcgactgaggccggcttgggctctttggctccacctgtgtctgcgcgaggctgttccctattggagtccgcattgttcccctggacctgagtttctcccctggtcctaaaggccgaggcctctgagttcctcaagtgcggtgaccgcaggtctcaccttctcctctccttgcagcaggctgagccactcgcgcacccgccccaggcttccaccttgcaacctctatccctggacagcgaggcctcagtttccccattcgcaccaatgagctcccggtcaacaccccgtcacgcctcagtttcccgaatgttcccagagggctgagttcccgatctctctcccgcgtgggcatccccgaggcctcagtttctccgcccaccccagcgcgccgagcccttcccccgaccccggcgacggccaatggttggggcgcccctcccctccccggggcggggccgcgtgacgtgccgggaagccggagtctagagctccgggcgcggggaggcgcggccatggcaggtacggcgggcccagcggggcggaggcgcggggcgcggggctgcaggggcgcggggctgcagagccgtggggcgagcggcctccctgcagcctctcgctgtccgcagctccggagccgctgtccccggcgggcggtgcgggcgaggaggcgccggaggaggacgaggacgaagcggaggccgaggaccctgagcggccgaatgcgggagcgggcggtggacgcagtggcggcggcggcagtagcgtcagcggaggaggcggcggcggcggggccggggcggggggctgcggcgggcccgggggcgcgctcaccaggcgcgcggtcacactgcgggtgctcctcaaagacgcgctgctggagcctggcgccggggtgctgtccatctactacctggtgagcaccccgcctccctcgtcccatcgcggctcgggcaggaaggggaaactgaggcctggagttcccttgctgcaggacaagcttcagtgtagggaggggacactgaggcccggagctcccttgctgagagacgagccccggtgtggcgaggggaaactgaggcccggggctccgttgactgcaggaagagctccagtgtgaggaggggaaactgaggctcggagctctcttggctgcaggaagagccccgacatgaagaggggagactgaggcccggagctcccttggcggcaggaagagccccggtgtgaggaagggagactgaggcctggagagctcccttgctttaggacaagccccagtgtggggaggggaaactgaggcccagagctcctttcctgcaggaggagctcccgtggaggggacactgaggcccggagctctttttacgggacaagccccatgtggagagaggaatctgaggcacagatgggtccttctggtggggaggacgtagattaccaaacaccccatcccacaaaggagaagctgaggctcagagaggagccaccacccgcgcagggtcagatgggcaacaccccggccttcctgtggtttcccagccgtgaaatggaatatttccccaccatgggaaaattaggggatggttaaatgaataaagccctca[137 bp omitted]ctgcctcccggttcaagcgattttctgcctcagcctcccgagtagctgggactacaggtatgcgccaccacgcctggctaattttttttttttgcagttttagtagagacggggtttcactatattggccaggctggtcttgaactcctgacctcgtggtccgcctgc[140 bp omitted]tctgcctcccggttcaagcaattctcctgccttagcctcttgagtagctgggattacaggcacccgccaccacgcctggctaatttttatatttttagtagagatggggtttcaccatg[131 bp omitted]tgatttgtgaatggtagcacattattccccttctgaatgggagtttctgaatggagcaactgctgagtgttgcatcctggagacacagcagtgatcaagacagacagaccctatccccgatcttaggggtttcttggtcatggtgggcggggtgcagatatctgccaggcagcttggtgcaggctgatcaggtttgtgggtgtggactcccaggcactgaggaggccctgcagccggcctgagaggtgttcctggaagccctgtaaagacatgcctgagggagcgtaggtctggggaggaccccccgggagagagggcatggtgggtgttggtcctgggcccagccagctgactgtcactgcaggggaagaagttcctgggcgacctgcagccagacggaaggatcatgtggcaggagaccgggcagaccttcaactcacccagcgcctgggccacccactgcaagaagctggtgaaccctgccaagaagtcgggctgtggctgggcctctgtcaagtacaaaggccagaaactggacaagtacaaggccacctggctccggctgcaccagctgcacacgcctgccacggctgctgatgaggtacgtgctgcagcctcctccaggaagccgcccaggtcactgtggaatgaggggtgcccagcctggcacagctctctccggaggaggtattagtaatatatacaaacacggatggagcccttaccacgtgacatgcctcctccatccctccagggctggggcggagagaggggacatgggagcttgggctttgagggatgagcaggagtttgtcagagcaagttgaagggaagagctttctagaaggatggaatggcatacgcaaagtcatgtagacaagaagaaagacctgctggtgtcatgggtggctgagggggctggaaatgatggcagggaccagaggggcactgggggaacttcaaatgctatgataatagatgttccctgagtgttcaccagccgggtgaacttgaccaaggaccctttgtgtgccttagtttttttctttttttttgagacagggtctcactctgtggcccaggctggagtgcagtgcccccatcttggctcactacagccttcacctcctgggttcaagcgatcctcccacctcagcctccctagtagctggactacagacgcatgccaccacacccggctaatttttggatttttagaagagatgaggtttcaccatgttgcctaggctggtctcaaactcctggcctccagcaatcctcccacctggacttcccaaagtgttgggattgcgggcgtgagctactgcactggccgttttttttttcttatgtgaaatggagatggtaggccaggcacagtggctcatgcctgtaatcccagcattttgggaggctgaagcaggcaggttcacgaggtcaagagatccagaccagcctggccaacatggtgaaaccccgtctctactaaaaagacaaaaattagccaggcgtggtggtgcacgcctgtagtcccagctactcgggaggctgaggcaggagaatcacttgaacctgcaaggcggaggttgcagtgagctgagatcacaccactgcattccagcctggcaacagattgagactccatttcaaaacaacaacaacaaaaccccaaaatggagatggtaccagtgcccatgtgtggaatctgtagggcaggcaggaaactgaggcaggagcagatgctgtagtcttgtggcagaatcttttttttttttctgtttttgctgttatcgccttcaactgattggatgaggcccacctgtagtatcaagagtaatgtcctttcttcttttcgtagatatgttttttttttttttcaagacggagtcttgctctgtcgcccaggctggagtacagtggcacgatctcagctcactgcaagctctgcctcccgggttcatgccattctcctgcctc[133 bp omitted]ggcctcccaaagtgctgggattacaagtgtgagccaccgcgcccagctgcctgtagatatgttttcataaacttttttttatgtacgaagtttattgcatgaaggagttaacactagtccatgttaaaagcagaccacaaatggttacgttatacaagctgtgaggtttttaaacttgtgacaaaggacagaaaggaaattctactcattgcaaggaaatcctcacttaagcttcagtgagccacaagcacttaaaacccatgaacctgcccgacgcagtggcaaaaaaacccttgacccttcacatgatcctccttagtcagtccagtgtctacaaggaactggcaaatgttcttgcactggtcactctgtagctgaattacttctccatattgtgtttttttttgttttttttttttgagacagactctcgctgtgtctcccaggctggaatgcaatgccacgatctctgctcattgcaacctctgcctcccgggttcaaatgattctcctgcctcagtctcgcgagtagctgggattacaggcgcccaccaccacacccggctaatttttatatttttagtagagacggggtttcaccacgttggccaggctggtctcgaactcctgacatcaggtgatccgcccgcctccgcctcccaaaatgctgggattacaggcgtgagccaccaagcccagctgacttatccatattctggatgctcaattacagtatcattgcaggcaggcaaattgcaaatttcttttttttttttttttttttttttgagacggagtctcgctctgtcgcccaggctggagctcagtggcacaatctaggctcactgcaacctctgcctcccaggttcaagcgattctcctgcctgagcctcttgagtagctgggattacaggcacacaccaccacacccggctaatttttgtatttttagtagaaatggggtttcaccatgttggtccggctgttctcaaactcctgacctcgtgatccacccccatcggcctcccaaagtgctgagattataggcgtgagccatcgcgcccggcctaaatttcttcttaaacaccttcactagtttctttttatcgtaatcatcactgatctcttgcaggacagcagtaagcgttttcctgccatttttctgttgaattcttttttttttttgagatggagtctcactgtgtcgcccaggctggaatgcagtggtgcaatcttggctcactgcaaactctgcctcccggattcaagccattctcctacctcagcctccaagtagctggaattataggcgcccaccaccaggcctggctaatttttttatttttagtggagacggggtttcaccattttggccaggctggtcttgaactcctgacctcgtgatctacctgcctcagcctcccaaagtgctgggattataggcgtgagccaccatgcccggcctctgttgaattcttatatggatacagtcctcagtgccagcaggaagcaggtcatcactgttacttgcatcagcagaggggttgaaagagtggaggttctggatagtggacaaaagatataattctgtttttgagatggagtctcgctctgttgtccaggctggagtgcagtgctgtgatcttggctcactgcaacctcccgttcccgggttcacgcaattcttctgcgtcagcctccagagtagctgggactacaagggcgcgccaccaagctcagctgatttttgtatttttgcatgtttattagagatgcggtttcaccatgttggtcaggctggtctcgaactcctgacctcaagtgatccactcgcttcggtatcccaaagtgcagggattacaggcatgagccaccgcagccagtcacgattcctttgccttggtgggaactgcctgtggaaagcagtggtggcgggagaaggcgagtgggagggatggagcgtcaggaagtgagggtgctcaacgggaggctgccgagtcctcagtggctcagtgagtgggtctattttttttttttgagatggagtgtcgctcttgttgcccaggctggagcgcaatggcgtgatcttggctcactgcaacctccgcctcttgggttcaggcgattctcctgcctcagcctcctgagtagctgggactacagatgcccactaccatgcccagttaatttttgtatttttagtagagatggggtttcaccatgttggccaggctagtcttgaactcctgacctcaggtgatccgcccacctctgcctcccaaagtgctgggattgcaggcgtgagccagccatggagcctggtcaagagcaatgtcctttctgaaagtcaccttactgtagatatgaatcacatgtaacaaatgccatcgcagtaatgcctagatcagtgttccattaaattaccaggcactcttgcctagctaagatgacacaggaaaccattctttcagtatgtattcagttagtggccaactgtgtgcaaggcctgttttaggcactgaatataaagcagagggcaaaaaaagtcaaaaatccctgcctttgggtgggagttgtgggggaagaaggtggttgggggggcttcactgagaaggtgacatttgaacggagaactgaaggtggggagggagggagggtgccatgaggacttctgagaaacagcctctgcaaaggccctggggcacgaccgtgcctggtgtgttggaggaacagcgaggagcctgtgtggctggagccgagtgagtaagggagagagaaggaggtggggaggatgggaaggggacagggcaggtcatgcagggctctgtaggttatggggagaacttgggctttgaccgggaggaaggtgggagccatggagtgttgcaggcagaggaaggacaggatctgactgaggtgctcacaggcgttctctggtggctgctgtggggactagactgtcgggggttagggtgggatccagggaccagggcagaggtgagtgagctggtccaggtgagggatgatggagtggcccaggccgaccatggagcagggaagaagtgggcaggttccaggtatttttggaagtgtatccgccagatttgctgatagatcagatgctggagtcctgagcaagtgggtggatcgagctgccaaaattgggggatgtgggaagggcagatctgggggttcagtggggcccagcatggctgtgttgagtgtgaccctgtgagtcccccacatggagacatagagaggcagctgggccctgagtctggagccgggcgaggcttgggctggagacaggactgtgggcagtgtcaggtgtagacaggatttggagccctgagaggggatgaggccacctgggaggggtgtggagggaggaggcctgaaaacccagcctggggccagcaacagcgagaggggaggtgagagggagccaggcgagcgtgggatccgggggttgtgtgaggaccgtgtcctggtaggtaggaggctgtgctgggtcagatgctgccgagaaggtgacgaggacagaaagtgagatgtgacccagagaggtcacctccacaagggcagtttaggacagaactggaggagaggttatttttaatttgtatttttgtagacagagtctcgctccgtcacccaggctgtagtacaatggtgtgatctcagttcactgcagtctccgcctcccgggttcaagtgatcctcctgcctcagcctcctgagtagctgggattgcaggtgttcgccaccatgcctggctaatttttgtatttttagtagagatggggtttcaccatgttggccaggctggtctcgaactcctgacctcaagtggtccaccgcctcagcctcccaaagtgctgggattgcaggcgtgggccactgtgcccgactgggaggaaaggttactgaaagacgtgaaagccacctatgtatggtgctggctcgctcaatgaacggagcatctaggtgtatgctaaatgctttgtgcgtatgatttcatttcaccctgatgccatccccgtggagttggaggtcattgtgcccttttacagataagaatagacttggcggccgggcacggtggctcacgcctttaatcccagcactttgggtggccgagatgggcaaatcacaaggtcagacgatcgagaccatcctggctaacacggtgaaaccccatctctactaaaaatacaaaaaattagctgggcgtggtggcacatgcctataatcccagctactcgggaggctgaggcaggaaaatcacttgaacccgggaggtggagg[132 bp omitted]gggaggctgaggcaggtgggtcacttgaggtcaggagtttgagaccagcctggccaacatggcaaaacctcatctatactaaaaagacaaaaattagccaggcatggtggtgggcaactgtactcccagctactcaggaggctgaggcaagagaatggcttgaacccggaaggcagaggttgcagtgagccaagatcgtgccactgcgctccagcctgggtgacagagtgagaccgtgtctcaaagaaaaaaaaaaagataaaagaatagatagagttcagagagtttaaacccatttatgcctgaggttgcaattctttgaatttttgcaatcagaccttggcgatgactttgagcagtaggatataaatagctcccatatgcttagcgttccaataatggaaccctaggcataaatggcaatggtgctcaccaaaggt[134 bp omitted]agaaatcccgtctctactaagaatacaaaattagctggatgtggtggtgcatgcctgtaaccccagctactcaggaggctgaggcaggagagtcacttgaacccaggaggcagaagttgcagtgagccgaaatcacaccactgcactccagactgggcgacagagagagactccgtctcaaaaataaataaataaaaaataaattacaaataaataaaaaaaaatgtgaggtcttagcttaaggccttctctgctccctccctccctctagtggtcatgtggggcaatggcacttacggcttaggccaaagggctggggtgggatttagcagggagcgggggggcacccagctgagggtcccaccgctgtccctgacccctaacccctgcagagcccagccagtgaaggggaggaggaggagttgctgatggaagaggaggaggaggacgttctggcaggggtctcagcagaggacaagagtcggagaccactggggaagagcccttcagagcctgcccacccgggtgagaggcgtggggaggggaggcaggacaggggcggatacagctcgggttggggaggagactggggagaggttgggccttgatcttctcctagggcccccaagatggagacatggagagtcagctgggccctaagtctggagccggacgaggcctgggctgaagacagtcccactgcccagttttactcactgccttgacttcttaagctcaaatgctggattttattttattttatatatttatttattttttggtgatggagtctccctctgtcgcccaggctggaatgcagtggctcaatctcggctcactgcaacctctgcctcccgggttcaagcgattctcctgcctcagcctcccaaatagctgggactataggcgccagccgccacgcctggctaacttttgtatttttagtagagatggagtttcacaatgttgtccaggctggtcttgaactcctgacctcaggtgatccacctgcctcggcctcccaaagtgttgggattacaggcgtgagccactgtacctgtttttttgtttttttgagacagggttttgctctgtcccccagggcagagtacagtggtgcaatcatggctaactgcagcctcaacctcctgggttcaagtgatgctctcacctcagcctcttgagtaactgggaccacaggtgtgcaccaccacacccggctaatttttgtattttttttcagagacgagatctcatcatcttgcccaggctggtcttgaactcctggacttgagcaatcctctcacctcagcttcccagtgaaaaaaaatttcttctttgtaaataagagtctcactctgtaactcaggctggagtgcagtggtgtgatcacagctccctgcagcctcaacctcccatgctcaagcgatcctcctgcttcagcactgggattataggcatgcaccaccacacccagtggccacctaatttgttctaacttgggctggggagggactgaccctgcctttttctctcccagaggccacaaccccagggaagcgggtggacagcaagatccgggttccggtccgctactgcatgctgggcagccgcgacttggccaggtcagactcaccccaagttctgcccctgccccagctcacctggatctcttgctggtcttggggtagcaagggcaggggtggggggtgggacagagcctcagatcctcagagctgtggggttgggggagtcagtgtgggggcgagggaagagcctggggattcctgagactgtgcgaccctcctggcccctacaggaacccccacaccctggtggaagtaacatcctttgcagccatcaacaagttccagccgttcaacgtggctgtttctagcaacgtgctgttcctgctggtgtgtggcccaccctgtctaggggcaaggggctccggagcccagtcggtgggcagcgggcggggctcccctgcgtatcagctccatgagagctggggccttgtctgctttgtttgctactggtacactgtgggtgctcaataaatgtatgaaggagggtgcgtggccaggcccagtggctcacacctataatcccagcactttgggaagctgaggcagcgggtcacctgaactcaggagttcgagacaagcctgggtaacactgaaaccctgtctctactaaatatacaaaaattagctgggcatggtggtgcacgcctctaatcccagctacctgagaggctgagacaggagaatggcttgaactggggaggcggaggttgcggtgagccaagatcgtgccactgccctccagcctgggcgacagagcaagactgagtctcaaagagaatgagggcacaggctggctccagtgttggggcagggccacagcctgagccagtcttttgctgttcctcccttccccaggacttccacagtcacctgacacggagtgaggtcgtgggttacctggggggccgctgggacgtcaacagccagagtgggtatccagggccaggtgggcgggggcgttggaggaccggggtcacggggtcacagctgcccctccccacagtgctgacggtgctcagagccttcccttgtcggagccggctcggggacgcagagactgcagctgccatcgaagaggaggtgaggggctacctgggaggtggcattctggggagggttgggaagggacatagctgtcctggcgactgcccagtggctggcagtgtcatcacccagcaaccgtgcaggtgagcatgcccgtctgtgtgcttgggaccccatggtgaagggtgaagaacactgctttttttttttttttttgagacggagtctcgctctgtcacccaggctagagtgcagtggtgcgatctcagctccctgcaagctccgcctcccgggttcacgccattctcctgcctcagcctcctgaatagctgggactacaggtgcctgccaccacgcccagctaattttttgtgtttttagtagagacggggtttcaccg[138 bp omitted]ggtcaggatggtcttgatctctttacctcgtgatccgcccacctcagcctcccaaagtgttgggattacaggggtgagccaccgtgcctggtcaggatggtctcgatctcttgacctcgtgatctgcccacctcggtctcccaaagtgctgggattacaggtgtgagccactgcgcccggccttttttttttttttcttgagacattctcgctctgtcgcccaggatggagtgcagggcgcgatcttggctcactgcaacctccaccttccggattcaagtgattctcctgcctctgcctcctgaatacctaggattacaggtgtgcgccaccatctccagctaatttttgtatttttagttgagacagggtttcaccatgttggccaggctggtttcaaactcctgacctcgtgatccacccgcgtcagcctcccaaagtgctgggattacaggtgtgagccaccgcgcccagcctaagagcactgcttttggatctcctagccctggtgctgaaacctcgccagccccctcccctctcagagccttggtttccttgtctgtaaaatgagcggcttcaatgaaaggccatcagatccaggcaccgggggttcacacctggaatcccagcacttagggaggccgaggcaggaggtttgctggagttcaacaccagcctggggccacagcaagaccccgtctctacaaaagataaaaaaaattagccagacatggtggtacgcacctgtagtcccatctatttgagaggctgaggcaggaggatggattgagtccaggaggttgaggcttcagtgagctgagatggcgccactgtgttccagcctgggtgacagagcaagaccctatatctaagaacataaaaagtgaagggctgctaatattgaatgctcagtgccaggcctcatctattaaacactactcataagtgccagttgctattcttttttttttttccttttctttgagacacgatcttgctctgttgcccaggctggactgcagtggcataatcatggctcactgcagcatcagctgcccaggttcaacatcctcctgcctcagcctccatagtagatgggagtacagacacacgccaccacacctggctaatttttgtatttttagtagagaagggggtttctccatgttggccaggctagtcttgaactcgtgacctcaagtgatctgcctgcctcagcctcccaaagcactgggattataggcgtgagccactgctcccagcctagttttaactgtttgttgagtgcttactgtgtggcgaccattattctgtaagctgggctacagcagtgaacaaaatgactttggtgtcctggctttgtggcagggtgcatcttttatattaaaagaggtccttgttggctgtctctccagctcccactggactcagtggcggtgggggcagggcctgtcttggtcatcactgtgtccccaggcctgatacacagcaggaattcgttcagggctggccagccacataagctcactagagccgttcaggcccctgtgcccgctgagctgcgcctctgtccccagatctaccagagcctgttcctgcggggcctgtccctggtgggctggtaccacagccacccacacagcccggcgctgccatctctgcaggacatcgacgcacagatggactaccagctgcggctgcagggctccagcaatggcttccagccctgcctcgccctgctctgctgtacgcgggatggggctgtggggggagcaaggaggggggatgctgggccagccgagcctcccagggccaacccctctccctctctcccgccagccccttactattctggcaacccaggccccgagtccaagatctcacctttctgggtgatgcctcctcccgaggtaggtggggctgttgggagagcctggggggcccgggagcactggggcatttgggtcacgactaggcaggggcccctggttccaggctccactggagagttggggccccagtttctccatctatgaaatggggacgtgactgctgccctgcccatattttggtgaggtcctgggcgtggggcctccgttgtgtcattggctgctcagtacaaagagggctcccttcctgaccctgcctggcttcattccccaatcctgccctgaagtcagaggtcagccctgggaagtcatttcagggccctggctctcctctgggcctctcccacagtaaggatgctacactgcctccctggtcccaccaccaggtgccgatcccggtgcagagctgagccggggtgtgcactctcccgttcccagcccgggcactgccaattgtccccagctgccatgggctgcgggctggtgaggcttctctcactggtctgtgtccctgccagcaaaggcccagtgactatggcatccccatggatgtggagatggcctacgtccaggacagcttcctgaccaatgacatccttcacgagatggtgagctcgctgcggggcgggcaggcaggggctggcagtgcgcagctgggcacacgatgcgttggtctgcttcccaccggtgggcttgggaagctatggctggtggcgccttgggggcctgggttagggcttcttccatcactcaggacagagtccaggcccttgccagggtccctccaacttctgccctccctcacctccccacctgctgttctctaaggcactggcctcttctgccaggctgtccagtagagaaaccccagggactttgggtggtaactggatgaacactta[136 bp omitted]catggcgaaaccctgtcactaccaagatagaaaagctagccaggagtggtggcgggtgcctatagtcctagctacttgggaggctgaggcaggacaagctcttgaacccgggaggtggaggttacagtgagccgagatcacgccactgcgctccagtctgggccacagagtgagaccctacctcaaggaaaaaacccaacaaaacctaaactagttcgtcaaacctgtgacctcacaggtgtcactgctggggatgaggccgaaccagggggccacgtcaggcccgcgtggttctggagaactgggctcggtgagtgcaggtccaggtggacctctcgtggcagccacttgggcaacgctgctgcctccccctcgagagagccctcctggacctaagctaggtgagccctctggctaaggtcactcgtgatctctttgtggttggtttgttagtgatggggtcatgtctcagggctgcctgagactggaaccccaggagaggcgctgaggtacctcaggcttggagggagcctgggagtccatgctcctctgtcctgtagatgctgctggtggagttctacaagggttcccctgacctcgtgaggctccaggaaccctggagccaggagcacacctacctcgacaagcttaaggtgagccccaagtccccgcagacctcctaacggggccccaggagaggccccctgggcagcctaaaaggtggcagcaatgagccccgtgggcctcaggggcctgagacagcccagctggcagactggtgaccctggtcaccccgtggccaccccagcagggtgcaggccagatttgattggactgtggagctttaagctccggcagtgccggatgaggtcctggcagcgggttttgggagtggctcccctgcagagggcccagggtcctggccacccctgagtgtcttagggtagtggttcctggtttccctccacctggcatagaaagggactcattctgctcagctctcggctagctgtggaggctgtggtgtccccatgggtgtctggaaccaggcagggaggggctgaagtgggggcaggatcgggagtgtgcacataagccccacccctccacacagcaccgctgcccctgggagccaggccctcggttacatactgccccactgggtaagcagcaggctgtgctgcgggaccccagccctgtgcctcggtctcaggggggctcagtcaggatgctggacttgcacggtggactgtgaggcgcagggctggctaggacccccgggcacagcctgaggcccagccccctcgtttcagatctccttggccagcaggacgcccaaggaccagagcctgtgtcacgtcctggaacaggtgtgcggcgtcctcaagcaggggagctgagccttccagggcagggtgggctccagttgtcttgagggtccggatgggctcaggtaataaagaaacggaagcagcagccagccacgctggtctccccaaggctggggtgagggtggctgggtgcccaggctggtaccatcaccccagcttcctcacttccagggcagggcattaacttccaggatacccctcagcccctgcacctgggaactggcacaaaagcctcagggccagtcccacccaccttgggctcaggagcacctggggtgctggagggacctcctggggtgtgtgtggctttggagccggcccctcaggaaggcggtgggtggcaggcccacccctgcaccaagacgaggcaaggggctgtagaaagagacatttaatacttctgtttacaaaattcaggcgtacatttcagtttgccctggaccgtgcccaaagctgtgtgctcatctctgcgcccctcatgtacttctgacgaggggggtgcagggcagggcagagcagagcctggggtccggaggcttcactggaccacagggggaggggaatgtgaatgtggcctggcccagagaactccccatttcatcgattttgcattgggcgatagaggaagcagatgtcggggctgcctgccttggtctagaggagatggctggggccacttcccacagggtgaagtggcagcggctcagcaaggggagcctggccaccaggggctgggacatgcgctcactggaacctttgtgcttggccctcggcagcgcggctgtggtcccgtgtgaggtgtgctggggtgggtgtgggtggctggtggtggcagcttgtgccagagtgacacaggcctccctgggttgggatgggggcagttaaaaagctgaaaaggtacttggctttctgagggcggggcttgggaggcagggccctgcaggagaccatgttctctgtcctcaggcagatcccagctggcctctgtccccgggctgcaagctgacagcaggcccgggaggcggtgaggccctctgccctggccttgaggagaaggagtgcgtgtgtgaggcgggggtgcattggccctggagtagggccagggcccatcaccagcaccaggctgggagggatttaaaaccagggtcctatctctgagccaccccatggggaccctcgatcccatcctgttaaggctgcgggactcgagggtaggcagtgggccgggcccccgtcgggtcaggacggaggtgggggctgccccagaggaacattagtgtttctaagagcaccttagtgttgccccgcctcggccagctgggcgagaagttggggagcgggggaggaggctggcgccatggagtggggaagggagccgtcaccgttgggagtcagcgctagtgtaaacaggcatccccacccacccagataagcccccccacccaagtgtggggtcctgctcagggagtacctcaagggccggggcccaggtggcgccggcaggctcagacaccgccctggcagcaggggctccgtggaatgcaggagacccagcagggggtgccggccagtgtggacggaggggcggggcggggacacgggtgagtcactgcggcaggggcacaagcacctccacgtagctgagcgggaagaagcccgactggccgtccagcatgccctcgtaccagttctcatcgatctggttggtcagcgtgatgacgtcgccctcatggaagcccagctccccgtcgttctcgggctcgaagtcgtacagcgccttgcagctcggctggtccaggggcgctgggggcgggagcgggctgtggggctggggctgctacgcctcaccccgcccagtctggggtctcagacctgctgtgacctggagcgtgtgggtgggcatgggcctcccctctgccctgcctgggccaccccctgcccctgccacttctggggtccggcctctactgccacccaggagggaggatgggagaagcttggtttaagtggtcaccaaagctactcctgggaagtgctggggacacccggtgctgctgcggtgacagggagtgaccagatgccctcaagcccttgtagccaccacacagcctagagctagctgggctagtgcccttggcaatccctcattcacactgtgaggctgagacccagaggggtggcatcttgcaggctgtggggcctgtgccccctactgctgcacgagcctggcccctccctgcttgagatgggcagagaacagggcgggaggagaaacaccctccccgaatggccgagaaggcagcactgaggtcgaggcgggcctgggaacactcacgcatgctccggctaggggtccggatgggcttgtcggaagatcggaaagacgatgaagctaaacacaagcaaaacgaggaggctgtgggctcaaaacggtcgggcagggccccttctgcagaaggctggggccagcccttcccgtctgccttggcggtccagatggagcacggctgagagctgcacccaggagtctggcgctcagagacccaggacagggccagcccttggccactcccacccgctggcatttgcctccgcaagagggctccatgccccattacctgcgatcttgggggctgtggtgcaggggaagcccccgttggactgctcaggctctccaaggtcaaagggctcccggggcttgggcttatactcccgcttagggcgtgaggaagcttcccgcatcctgtgaagggagaggcgtgagtggaccgagcccgtgtcacggccgaggcagccccactcttgtatttatgctgctgcctaatgacctggcctgggactgcaggaagaggccgtcagtggggttgtgacacatggaccctgggacacagctagactgggatgtctacccagagggcctccagcctggacccccaccttggaggcatcccagagattgccaagcagctggggcctgccacagcatctacctacaacacccccagtcgcatcccctgcctcctcccccaattccccaccacggacggcgccccacatacgccaaggcccctgaagcaggtctggcctctgcattcagggaggggagcctgggtgttcctgtggcagcagcaacgtgcagccagggagggagtccccggggcctgcatcggggcagggctgggtgttgactcagagttctcagagccccagctcctctgacctcgcggccccccaggcctttccactcagtccccaggaagaatccaggatgctgctctgccatgtgctcaccccacagcgaggtgtgctgcccacttgcgctggcagagggcgcatggcagcccagactctggagagaccaaggccctgggctcacctgcgcttgagcttctccgccagctcgtccaggatctgcacggcctgccggtggtagtccagctgtgcatccaccagggccgagagctgactcacctgctcgatctgtggggacagtagggctcaggggctcctgccagtgccactgtcctgtgccttccctgactcccgaggtgaagccacaggaggcaagggggctgagaggggacaggggactggggcccataccctccacctcccctgctgcagcggccaggtaggtgccgatctgtcctccagctcccttgaggcaccaccccggcctcccaagggcataggtcttctcaggatgtgacaccccgagctactcacgtcagtctccaggaggttgtgcatgctggtttctgccacctccttggactcctcgaacttctccagcgcctggcgtagctcctcatcggggatcttgccctgccgcttcttcttgtagtcaaagtccaggcggcggccctccagtttcttcaggtggtgctggagacgtgggggacatgggtcacaccagtagcggccagagggccgccccacgcatggctttgacccactgtccctgcaccactggggatcctgcctgcctgagacccagagggcagtgccgaggctggaggtgagggtggcaggaatggggctgccccatccggcagggggaagggacaggccccaggctggcgcaggagcagcacctggatctccttcaggtctttctcgcacaggttctggagggggtcaatgaagttctgcttgacctcgatgtccagggagtccttcacctctgccaggcgcttcatggactcgccggcatccagcaatgcgtcacctgtggagaagtggtgggggaagccatcataccgggcctgggaccactagactgagacactcctcagcctttgtttttgaaatagcgtttcacaggctggaacgcagtggcgctgtaccagctcactgcaggcctcaaactgggctcaagccatgctggcacctcagcctcccaagtagccgggaccacaggcgttcacccccacacctggatcctttccaacttctttgagatgaagtctcgctgttgcccaggctgcagtgcagtggcatgatctcagctcactgcaacctctgcctcccaggttcaagcaattctcctgtctcagcctcctgagtaagggggattacaggggcctgccaccacatccagctaatttttgtatttttaatagagacggggtttcaccatatagaccacaccggtctcgaactcctgaccttgtgatccgcccgcctcggcctcccaaagtgttgggattacaggcgtgagccaccgcacccggtttttgttttgttttgttttgttttgttttttcatagtctcggctcactgcaacctccacctcctgggttcaagtgattctcctgcctcagcctcccgagtagctggggttacaggcatgcactaccacacccggctaattgtgtgtgtgtgtgtgtgtgtgtgtgtgtgtgtatatatatatatatatatttttttttttttagtagaagcggggtggggtttctccatattggtcttgctggtctcgaattcccgatctcaggtgatccacctgccttggcctcccaaagtgttgggattacaggcatgagccaccacacttggccccatcccaacttctaacagccccccaacactctaagcccagggcccggaaattggaactcagggcaaaacaaaggatcctaaaatccgaatcgatgctggacgttaaaccagaccctccaatgctcctaaaagggcctaggtttgcccttaacaggtggaaggacagatgctggggggtccaggccctggggaagcagctggcttgagttggggaaggtctggagctacaggaaggggccctatcagctgctggccagtgctggatgggttggtctgtgcagtctcctgcacctctgcagctggaaagctgtgggggccactgtacgtccccggcactcagcacatgcagggcctggacctgccctgcctgtgttgaggtgtggcctccagggacggtgggcgtggcttccagagagcaccactcaccaaagttggactcgccgcccagctccttcccgtggcggatcatgcactcgcccagaagcccctccgactgcgggtagccggggttcttcacctggccccggatcttggacaccgtgttgagcatggtcagcttagcccgcgaggctgggataggatggccaggtgggtgtgggctgtgaggcctgcactcctctgccctggcagactgcagcccccacatctcctccccacccttgcttcctgtgcctgtggacagcctaggccacacaaagcacagtggaatccccagagggtcccttccctgctcctgctagcctcaaaggagctggcagcgggtggagaggtgaccaagctcctcagggggcaaaacctcctccttccaagggctgctcctcttggaacgtggctatgacccctcatctggggggtgccagggaggaggcgcagcagtgatgtgcagcggggggtggttgaggccaaggctcccggggtgggtgatgagctgtgtcccttccgctgcccgcttgggtctgctcctggcagggcctgagtggacactgctgggtgtgcgtctgccccctgtccgtggcctcctatggagccagcatttgggttttccttggggaaaagcccgtctctcagccagggagacccagtcccaagcccaagaggtgaagtccaggccaggggcactggggaggggcggccaatacaaatggatcccacaagtaagctgggggagaggctccctgccaggactgctggctggaagaggggttgaaggctgggacggccctgaggaaccagtcggcatgagagtgaagccaacagaggggctgagctgctggttgaggtggaaaggcagcatgcagcaccaaggatggcctctgcactccgggatccagctgtgcctgaagcccacaacccatgagcctggcggttctgtcatcccctgccttccctctgacacagaggccagagggcctggggcaggccctggcagtggctggagcacccacctgggttgggctgcaggtactcgatggtcctggccagcacttctgtcaccgccttgctggtgacatccaccttctgtgaagagaagcagcatataagactccacagccagtgggggcccaaggcacacaagacccccgctgctgcaccgcctcctgccctaagagcccataccaggaccccccaaccccctctccatgtcttcagctcagccatgtccccacagctgcctgcccacggcaggggagagagctggtgcccgtcaagtccagctgacgaggcccccacaccaccccatctctccacacctgccgggccccatcactccagacccaggcccatcaaggttggccgcctccactatgcccggcagaggtcaggccccagcagtgccaccaccacacagagcacgcagtttcttcctcaccttctccatctctttgaagtcatcatccagcttggtcccctcggcccctccgaccttctcactgaccagctagaggacagaagaggggaaacgctgtgagcccaggggtaggaggaagaagaggacaggaggccctgagccgccttccagccacatcgcatccacagctggaggcaggaggccaagtgatcaggacacacacctcaggcactgccgtgggcaccccagggccacacgctgcctgcagagcagggtgggcctgcagggggagggggagggtgggggtggcctgcccacctgtgtgtgtcccgactgccactcacatacccactggggaccctgccacagtaggccccatctgggccacggtggagtccagagcctcagcctgagaacacatggctcagaagacactgcttccagaagcgcctacacaaacatccccacagatagcaatgtggggatctgcccccatccttgagtatgtggggtctacttaaaaaaaaaaatcctgccagcttggctgggagaggcagcaggagctgacagttacgagaagaggtgcaggcagccgggcagggaggccgccattctcctgtgctctggtgcccgtgtctgcaggatgggacagcccagcccttgccccatgtggacactgagtttcacaaggcagtcaacacaggcctggcacaccttggtcctcacggctctcagctacggtgaaagcgatgacaatgacaggcacttacagcgtctttcctcgtgtggtgggaaggcagaagcaagcactgaattcccaaaccactccctctgacagcgcctgggatgcgaaaaacagccctgaaatgtcccatggaacatggcgggaaccactgaaccccagcaccgctgtctgagcacaggcgttgctttcttcaccccacgtatcccatgtgtgcctggcgccaagggatgccgcacagagtgaggatggacagtgtgaggcccttcccagcacacagcgcttcatgaagagccgagtggctgccaggccctgccacaaatggaggctcccagagggaggccgcctgaggtcacaagcttggccctgccctctgggggccaagtgtcacagggtgtgccatctctgaagtcatcggcaaatttaacatcccgggtctgatcacttgtgtgaagacgtgcacacacggcctgggcaggagagtgaggtgttgcgtgccgtgggccatggcctgtgcccctggtgctccccaggtctgattggtgcttgcctgccccgagctgtcacaagacgtggccaagggatgccatgagggtccgtgtggtgccacactgcgttggctgtgtggggctggggggtgtccagcagggcagtcaggagtttaggacccagcctgggaggaagtgacccaagagcaggaagtgcgggggcaggagaagcttgagcctggggctctgcccacgccaggcacctggtgtaccctctagcccatgcctggaggtcacagcccaaggcaccatgagtgcaaatgcccccaaccccaagttctgcaaaaggtagcctgcccggagtacacggctggtcttgtgtcctggcaacctgcccaaaaagacaccagcccctttgccaaggaattcctggccctcctccaaggcttggctctggaagcccccacaccacgggactgtcctcacccacgcatcgggaccctttctgtccacctgccttcatgtgcggggtgtgccgggcattcagtgagcacaggccccatgcctctgacccctgtccctttcctgcctgtgggttggtggctctcaactcagccacacagcaccttggaagcttcttaaaaatcccctcgttggccgggcgcggtg[169 bp omitted]gaggtaggagaatggtgtgaacccgggaggtggagcttgcagtcagcagagatccagccactgcactccagcctaggcgacagagcaagactccatctcaaaagaaagaagaaagaaaaaaaaaatcacctcgtcacacccaccgcgggagggctgactctggcacaggtgagaagcaggaactgtcccttgcggggcaggagagtggggctgccctccatttctgctgaaggcattaggaggaaggagccccccctccctaggtgtttttggggcgttccactctatttcctgggacagtttcacttcttttgattgtggcgagagagggcgtgctcagagccagcggctgccggagagggaaatgagtggctgatgtgagactggactcttctgggaagccgggaggagaactgaagccagcgggctgcgaaaccacaccttctgggcggaggccaccccggccccacgacctgcccaggcaggacccagtgtgcaggctggcaggagtggctccgtcagggcccttccccagccccctgcctctcacagggcaggaggagaggccctaccggcgaggaccacatcctgcctctgaggggaggggctggggacccgccacggtaccaaagacccacctggtggcctctggctctggccctggccccacctgcccatctcacctgggaatccaggaccctgccttcctgagccccaggacgacttcctgaacccccacaaccgcctgactcctcgcacccctgacacccgggaggctgtgccctaactacccgggtccctctgctcagctccagccaagtcccttgtggtgactgatggtcccccacgggccaggcactgggcaggggacacaaccctgtaaggccccttctctccaaggcttatgggctagaaaccagcacagatggacacagggatgagcagccacaagggaaacacgggaaaagcaaggcagccgggccacgtgcagcgccggccgcaagcgcggaaaccaagcgtgggctcctgcccgctggggccctactcactgcggtctccacaccagcacactgctgagcacggaggggaccgagagtctgcggcagagctgggcgccacggggaggctcaccagagggcgcctctgggctcgctgtcaggagcgagtgttcctaaccctggtgccatctgccaggcaagagctgcctgttgtggggcagccagccccaatgcccccgcatcagagaccctaccggtggggagggaggactgaggccatggtcccagcagtccattcctgccgagggagactctgcaggctggctgtagccctgactagtgcagcggactcagcagtggcaatgacagctccgcactcgagtccatcccatacccacaaggctcgcctcctgttcccaccccgcatggcaggaaacggaggaaaataatggggccactcagtagccagggacccaacagggctcaggggtgagaccaccctccgctgactgaacctgcatcagggtggcagggtgggtgggggccccctccccactctcccacagggccccacctggacggggtcagagtaccagctgcaaaccccgagtgaccaaccgcaggccccacaagggctgccatcctgagagcaacaccagcgccttctctccccatgcctggaacaaacaggccgagcccaagagggaacagtctccaagactctgcccctgcttcagatgccggctggcctcccacagaggctgtgacatgtccccgcctggagcagggagaagtgaggtttggccaaccctgccaggcgaggaccagggctgagaagtcactatgggagaggccccggctcagtcaggcctggcagtggcctctgggaaggatcccactgttgcctgccggacacttccccagggtttggcaagactggcttgtggtctttcagatctttgcccagagatgcccagcggagacctgcccactctatgctcacgcatcccacctgcacccgccacctgcatgccgcatggattttctgcctgaccctgtactctgtcacctgtgagccaggcacctgggaaacgagcaagctggacacgaagatggggttttgccccagagcatgggactcttgtccccctgggagaagggggctattcctttgaagcctggcattcattagagtttagacctttggctctctttggaggggagcaagggatgtgacacacagaacagagaatacaaggtggaaaaatacagaaatgaactgtgaagacactgtggactgagagtcaggacagggctaccgtaggcaggagaatcccaggttttacccagaggggtgtgggcagctgccctgtgcccggcaggcacagctgtggtggccacttggcaggagcaggaggaaaattccgaatcctgccgagtggagctggctgctgccgatgggcggccttgggatttaaacatctcagcggggaaacctgatccacacagcacggaacacaaatgcccgtctcgggcttggtgccccagcagactatctgctctgatgaattcacagggttttgtttttttttctcttttaaagaagaaagccagcgtgggggagggcaagggagggctgctgtggcccagcctgcagggatgcgccacatttgcccgcagaggggtcggccccagggtcctcaggtctcactggcagtcatgctgtggtgcttggtaatttccaggttcacagcagagttcacgggtcctccctcggctggggagcgggtctctggctggtgtctgcctgcccgtcggcatcggtggtgctgtggtgctgcacgctgtgctacagagccatctccgcgtccctccctgcagtcctcctcagcggaatctgtgagcgcacagaccacaggggcctcgcccagtgccaggcacagagcggagaaatggcaggtgggcacggctggtcaaccgcagcgaatacctgtgacaaggcctcatctttttttttctttttaaagaggcaggggtctcactatgttgcccaggctggtctcaaactcggcctcaagcaatcctacctcagccttccaagtgccaaaactacaggcatgacacagtgtgcctggccaaggccatacatttacaggactaggggacaacagccccaggacaaagcatgggttggggagctggggaccataggagggggtccaggcccagccacctgcaggaccagggacagggcaggcaggacacacggaacaagggccactattcacagtcccatgtgccagcccccatgctaggcactctgtgcccggcccccaacgtcacagaggaggaagctgaaggggacgtggaggaggcgagtgctcagcccctcctcacagtgggcgcagttctaacactgcagctgtgttcaaggcctggtcagccatggaaaggggcaaagccagggtaaggcctgcagaagcagcagagtccttatcagacctctgtgcaaaacagctggaatacagggtcggggtggaggccccagggagggacgtaaggatccctgtggtgtagaaaaagccctgacgtgggaagagggcaggggcaaaggatgtagggatgtatcatatccgtgtgtctctgaacccctttccatctgcaacgcccttccctgctggcccaacacctgggagccactgcccaacacacatggccacctcgagtccatcacagcttctttcccatgagtcaaaaagtcgaagacgcgcacagcctggaggcggcctgctgcccagcgacacaggaagccactggccttcgtgtccccttttccatgtgggctcccaggctcctggcttgctgatgtgtctgtctgtccttcctggaaaccttcagtggccccagtggcatggggactctccagacctgaggcccttgcgtgctgactatgaaagctcgcctatctacaggggcggcgctggctgcaggcagctctgagctttcctgtgacagtaagtgcctggcatgggtggggttgtggcccctgggctcctggtctgggagcctgcagggcatccgcaggtgaaaagcaggagtagtcattcctgcacatgctcagggatgaggccaggagggggagggagaggagcagtgggagggggggccacaggagcaccacaggtgccaagtgaccctcacaggtgccaggtgatcctcatggcccggcggcgaggaatcagacggcagaaacccactccccagcccaagggaagatggagggagcctctgccttggggctgactgggtcatcacccactgtgtgtgatgcacggagggaagggtcccgacagccggggctcccctcagcatctgggagttctgagagccctggatttgccactgtccttcgagcctccagcctctcagtagagatctcccctcctgtccatcaaggctgaatggtttttaaaaagcagcctttgggaacggaggcactgaaaacaatgaatcaagacaaagtttctgaaattattttctcacggaaaccccaaaccagacgctgccaccatggccagattgggcacccggggacagccacagacccacctctgtggcgggtcaggcgctcctctgggaaccaagctctggcagcaaaaggacagtggctctggaagccccaggcgtcctctcagccaaaggggcagtcccttgggcctgggctggcaaccgagataccggctctggactggaaccagaatgggctctgcctcagaccaggccacagagggccccctgagagcccggcttccccacggcccccaggctgtggggacaggcctgccacagacttcctggccagaggtgtggctgggtgccatggtagggaaagacagccagacattgggggccatggtgcggcccggccaccgcagtctaaatcgccttgggggtgcgtttctgccaactgtggtgctggccattcatgccgtctctcaggctgtcgggccctgccctgcctgactcctggctcttggagctggagaaaggactctcagattggcagagagcgataaatgctttgttgtgtgcgcggcagcgagccgatgtcatttgaagtcacagcacatgaaaatgagggggagaaaaaaacttaggcaagagaaatcctccagatgggccctggaggccccatccaagagtctgaggccaacacatcaggggaactggaagcagagagggaatcagccactggaaagaagtcacgcagacgaagtggtgacagccacgacaggaaattgctcagcggtggccacaacagagtggcagccaggggccaggggccagctctgtgaccatccccgagagagaaaggggacattcaggcctggtctatgatggtctggtggccggaggctccgtgagggcagccccagggccagaaggacctctcctgtgctgacagcaaagtcaccagcgggagtccagcccacactgcctttctgatgaggcctccagctctggctgctgactttaaaccctaaggaaccctgtgcagggcctgcatcccggaaggcctccaccagcccgaacctggcccgtccgccctagatggggcaatcggcgtttctcccgggacagcctcctccctggcctcctggccctcgtctgcattgagaggcttggcctctggtccgcatgctgcccttcccgtgctgtggccttgcagcccggcctctcccctgctgtcccccttggctctggcctggcccctgggcccctgagtcacccctgaggtgactcagcagtccttggaaacgcatgccgaggacgcaccctgcctggcccagctccacatgggtgtgggggaggctgcgggctgcgcctggtggccgtatggggcctaggctggccagtgctgcccaatggtgggggctccctcaccgcccgtctggcagaagccatgggccacacgctgtcccagcacatggtggcagggcggtgacctgggctcggctctaatgaccggcagccctggggctcccatcaccactaccagtctgcccaggaggcagcagagcactgagcccgacctgctcccctcgggcacctacgagacccacctgcccctccatgcgtgggggagaaggggtgccctctgctgtggaaagctgggacctactgtctgtggtgcgaggctgaccccacagagctccaggacaaccccgagaggagtggacagagccagccgggccctccagcccccacctggcccagctgccgcctctgggcagatgtctccacttgataaacaggacagctaagggcctaggagagacatgcctggcccaaggccagacagcaggagtggctaggaaggtcaagggatccccactgcaggccccaccaaccctggctctgcctggaatgcagtcagggcaggtggaaggggaggggcaacgccccagggctgggcgaggaatctgggagcaggtgggaagctcatgctaccttcccaggagacgggaggacaggcctgccaaccagggggctcagctatgtgggacacacgctcccacccttgcccttgcacagggtttcatccaaacatggagatgccagtgagtgcctggggctcctctcccaggaacaaaccacacccagagctccagcccgagcgaacacatctacatgaaaatcagcctcatgcatcatgcattgtaatttctcatcttggggaccaggcaggagggctgtgtgacatacaactggtaaaatcagtttccgatgaaaacttataaaaggaaaaagccaacccacaaacaaatgaggcgataaatcccctgaggctccgcctggcagggaaacaccagctctgcagcactgagcacaggctggtgttcccactgggggcagcatggaggatctgcgtccagggggcagagtgtgatgacatcacccacatgcacaggaacgataaggctttcttaaaaaacgatcttttctcaacagctcctcaaaaggagctgaggcaatgcatagccctgcaggaagagactggaaatggtcttggagagagaactgcggggcatggtgacagcggtgagaggctgcaggtgcacagatctcaacgaggggccgtgagttccctcactccctgagagctgaggagacttgcccgaaagcccagagcccttcctgagacacagaaaccatcttcaccatctctaagatcccttccatttctgaaggacttccatttctttgtgactgtgggccaccatgggcatgagtcacctgtcaccagagcctggtgtccctgtgcagctgtgccaggtgggcagaggagacaggtgaaggcacattcctcagcgcccgctcacagctctgcccaccgtgcattctgtagagaacctcagcgccctcctccctgccggcagccaggcagggatttaggtggtttctgtttggcctccagtgcttgcctctcccgtgtcctatccgcccagacctcagacctcagagaagcctcctcccacaggaagctctcctgattgatccccatcactggtctcctcaccttctcccaacacaccactgatgcctcctctctcgtgcgcctgccccttcacacttcatcttacacccccatctgcctgggcggcccccccatctcccctcagagcttttgctctcgctgttccttctccctcactgagcctccctggatcttcccatgctgggtcttagccaccagggctctgtccatccaaatgtccccatggctgcaaggctgccccaccctcctgctatcctcacggggcctcgcattcctcttgcttgcttgttttcgggtcccctgctgtcccgtctcagacacaggaagcactctccaatgcttagcgccctagaataaaggaccccgggcaacctcttgggggtcctcgccacatcccaccccttgacagcagctaagctccgggggcagcaactccccgcagtgacccggaaggcagccagatgatactcctcccatcaccttcccttttgtggctcgtggacggttcacctgggctgacactgatggaggccgccaggcccattcccagcctggagctggctccctccccagagagctgcaaggttgggaaaatttgcaaagaacaaaacgtgagctaggcaggcctagcctgactcacatcctggggacccagctaccacatttgggcagtttcttatccaggaggatgcccgggaacagtgacaggtctgaggtctgggcggataggacacgggagaggcaagcactggaggccaaacagaaaccgcctaaatccctgcctggctgccagcagggaggagggcactgaggttctctacagaatgcgtggtgggcagagctgtgagcgggcactgaggaatgtgccttcacctgtctcctctgcctatctggcacacttacacagggacaccaggctctggtgacaggtgactcatgcccatggtggcccacagtcacgaagacaggttttctgaggtgtggctaccaaaagcacccaggccagaagtcatcccgggtggcacggggcagggcagggggtggtgagaggcggtcagcagctctgcacagccagccgcgcctgtgcactggggccctctgcgagcattaggtgccagcagctgtcaccttgcagtggccactcctgccccctcgccaggtcacgtgcactggctctggcgcatgggtgcccctggccgctcagaggcactgcctgctccttacacagtgatgtcggtggtggaaacccgggctgggaatctcagaattgctgaccacggcctcagcacagaggaagcaggcaaatggcccgagtccccccaccatctcccctgcagcgagaagactgcagcctctcctgtctgaagactcgcgtttgggtcccgggcctgggagattctggcgggtgcagcctgcttcccagggccccttctgccccgctgtggctcatcgtccttggagggacaccactcgggacaggctctcgtcgccaacccaccccaagttctctgtcctcaaacacaagcttcctgccagcagggccaggcacagggacaggggtggcagaggcagcacagggcctggcacccaggtggcgtcagtcactgagtatatggtgagataataaatactagttgttgagataacaaataaataagaagcagccctgccctcgggagctcaggtgtgccagtaacacatcagagcaaaggtgtgccgtaacgccacgaggcaagcaggctgacgtgggattagggtgcctggatgggcgacaccgggactggatgtggttccagctctgccgttcggggctgtgactctgagcaggaacacaaacccctctgagcctcggttttctcaaccatctcaggcgtggatgtgctttagaaactacacaccaccaggccaggtgcggtggctcacacctgtaatcccagcactttgggaaaccgagacgggcagatcacctgaggtcaggagtttgagaccagcctgaccaacagggagaaaccccatctctactaaaaatacaaaaattagctgggcatggtggtgcatgcctgtaatcccagctacttgggaggctgaggcagcagaatcgcttgaacccgggaggcggaggttgtggtgagctgagatcgcgccattgtactccagcctgggcaacaagagtaaaactctctcaaaaaataaaaataaaaaaaacagaaaccatacaccaccctacgatcctaggctactgtgcactgagcaactgagtcccgaggaatgatgggtgtggggccggccaggggtttcacctccgccccacgacactgcctctgagcccagtttttctggagcaagaggcttcatgcaggcccttaagaagaagaagaaaaggaacacaccttacctgagtcacacccatctccaagggaccctggtgaggcactcacaggaccacgcacaccaggaaaaactggctacagctggctgatcgtgcacgaaatctcatgttgcgcccagagcgcctccagatcagccacagagtcaagtcccggttccaaaatgctcacagcacgggacatatttgtcaatggccgtgacacaaattctgaggttctactggcggacgagggcgggaggaaagaagcaaaggactgccaggcttggtggctcatgcctgtaatcccagcactttaggaggtcaaggaagcagatcacctgagattgggagttcaagaccagcctggccaacatggtgaaaccccaggcatggtggctcatgcctgtaatcccagctacttgggaggctgaggcaggagaatttcttgaacccagcaggtgggggttgctgtgagccaagatcacaccactgcactcctgcctgggtgacagcgcaagatgctgtctcaaaaaaaaaaaaaaaataaagcagcaaaggaccaagagagaaaatgactcaacttaaaaagaaggttggtagaaaattccccacatccctgacacacacctgctgctgtctcacaccccaggcagctgccacagccgctgcgccctctctcctgtttcccaatcaacctgcattcctgtcttcctaccagctgggaacttggcacagctgcccatcctgaacgcaactccttccctggggatgtcccgccctccctgcacctctgcacacccacgctcttcctgccttcgagaacgtgcctctgtgcatgggcgagcctgtggccgtgactgtgacccctcactgccaggatggctgctgctgcgacgtcaacacaaagcacgccgctctgccttgtgcttacttgtattttggggggaaagcagccctgccccccaaggcttgcttctctgttgtcatcgccccaaaggacaagggactggtgctgccacttcctgagctacgagcagtaagaatattcaaatctctcccaccctgccatcatggtctggtagccaggctcctcccagggtggcttccacttccctggaaggactggccccacggatgctgcatgggctcaggttggaggggaaggacacggcagggcagacccatgctgctggggccccagtgctgggggcctccctccaacacctgcctaagggatgcccagggcagggctctctccctgcaccggaaactctccctcctttccttgcttcttcctacatccaaattctgcccattcttcaaagccacggtctggagccatcactgaggtccaagtcaggctgaatgagtatttacctgtgccaggtacagtggaaaaggaaagacacgtaacccaggctcgcacacacacaagaacctaaggccctatgacagacaggacgccagcggggaggggccgcttcctccttgcggggagggagccagggtgaggcaggaaggaggtggccgtggccgtgggcttttaaggatgggtgggatctgggagcacgcaggagagagggcatgacatgagcctgcagcagtgaggctggcttggaaacatgcccaggacaaggtttggaagtgcccgtttggaagatgtgggagggcgtcacgggtgggtatctggctccagctcttggactggaaaaaacgtgcgtcaaactcatgaattgtcaactgtcttcaggacagtcggcggttttgaacatgatctgctctggtgtttctggggtgtgtggtcccctcaggcttagacgggcaatagcatgttctgtgtaaacctgaatgaggggacggttttcaaaatccaagttaagtaacggggactgaattttctatcagtccactagcttttaagtcaccaaggtgggattccagaggccagggaacaacttctgcgaagttgaagattagttccacagagtgtcacagccaaggaaggctggatggaaccccagctcttagcagggcacctcaagccaacatggcaaagtgaaccggtcctatttccttgttgatttcagggatgagagctaacagaggaaaaaacaactctgtttccccaccggcctcctctccctctctctgttcccccagcctctctgtccccctgcctctctctgtcccctctctctgtcccctttgcctctgtccccctgcctctctctatccccctgcctctctgttcccctgcctctgtctcccctgactctctctgtccccctgcctctctctcccatctctctctgtcccctctgcctctgtctcccatctctctctgtcccctctgcctctctctgtccccctacctctgtctcccgtctccctctgtcccctctgcctctctctgtccccctatgtctcccgtctctctgtcccctctgcctctctctgtcccctctgcctgtctcccatctgtcccctctgcctctctctgtccccctacctctgtctcccctctctctgtcccctctgcctctctgtccccctacctctgtctcccatctctctgtcccctctgcctctctccgttctcctgcctctgtctcccccgcctctctgtccccctgcttctctgtctcccgtctctgtccccctgcctctctctgttccccctgcctctctctgtctaccctgcctccgtctcccctgcctctgtctcccctgtccctctccacc[142 bp omitted]tcccgggttcacaacattctcctgcctcagcctcccgagtagctgggactacaggcacccgccgccacgccccgctaattttttgtattttttagtagagacggggtttcaccatgttagccaggatggtctcgatgaccacaacaaatcgccacaaacctagtgacttacagccacacacgacgtcttcaacgacatattaaagcaacacaaagtcttcactaggtcagaccctgacagggatcaccccgggctaagattgagatactatgagctgcactctattctgggggttctggggctttcctgccttttccagaatccagaggccacccacatccattggctcacggccccctcctccctccattgtcagagctagcaggcgctggcccctcaacagctatctcttgttctctcttccgttgtctcagctccctgtgaccacagcaggggaaggtgctccgctttcttttttttttttttttttttttgagacggagtctcgctctgtcacccaggctggagtgcagtggcgcgatctcggctcactgcaagctccgcctcccgggttcacgccattctcctgcctc[224 bp omitted]cttgtggataagccaggataatctcccacccccaggtccgtaccctttgtcccatctgcaaagtcccattttccatgtaagggaacagtcacagttccaggggtggaggtgaggggcagccgtggcgggtgctgtcctgcttgccacaggagctcatcacttctcgttattcgtggcagctctgttctagaaagctacctcaagcacagagttggccagtactgagccactgttcagaggggaaacacacagctaggtttctgtgagcctctgctcacaacatgttcatcaaatggtcactatgtaacccagttttgtgtatttcattttttctttttgagacagagtctcactctgtcgcccaggctggagtacagtggcacaatcttggctcactgcaacctctgcctcccgggttcaagtgagtctccagcctcaggcttctgagtaattgtgattacaagtacacaccaccacgcctggctaattttgtatttttaatagaggcagggtttcaccatgttggccaggctggtctcgaactcctgacctcaagtgatccacctgcctcagcctcccaaaatgctgggattacaggcatgagccaccacgcctggacattttttttttttttgagaccaggtcttgctctgtcacccaggctagagtgcagtggcgtgatcatggctcactgcagccttgacttcccaagctcaatcaatcctctggcctcagtctcccgagtagctgggactacaggcgtgcatcaccacacagagttatttttttttttattttttattttttggtatttttgtagagacggggtttcactttgttgcccatgctggtctcaaactcccaggctcaagccatcctcctgcctcagccttccaaagtgctgggtgacaggcatgagccgctgcacctgtcctttatgcgtatttccttagttcatatttactgtgattcacccacactgaactcatggacacggagctatcactcctgcctgagagaactgctctcacacatggtttctctgtgaggctcatcccagcctcctggcactgaggaacacgagacggcactgctgcatgatgctgggaccattctcaacagcgaaatcaccaacaaaatcccaaaaatgtgagaaacatggcgctaaaagcctgcaaatccatgccggaacacagcgtgagagccgggaaaaggcagcgtgatccacgccggaacacaatgcgagagccgggagaaggcagagtgatccacgccagaacacagcgttgagagctaggagaaggcagtgtggctttgtttgacctcggctaggaacatatgcgatgggtgacagattttttgctgctctgcacttgtctgcaaaagactgcaaaaggaatgatttggggctacaaatcaatcttatcaagtaggtgaatttgcacagggagcacgtgagtcctggcccaagctgccctctgcgacaaggctgggtgctaggtgctttctgtgagcgcggcctcactgtacacaacaaaactgaaaacgcaggctccagaggaatttacaggctggaggggatgttacatccgtgaggaggatgcccagcagaagcagagtcctcagagctgatggcgcaggagccccccagttcatcccgctccggaccacacagagctaaccctgagctgggagcctcctccccgcccacttggcttcctggccaaggcccccaggcacatacagcacggtggaggagggttgaaataacacactttacgagtgcgcaacacacgatattgctagccaccggtccaggactttcggtcatgcaaattgaacaggttgtttttttccaggctaggactgctgaaaacctatgtggctatttttctttttttgaaggcagggtctcgctatattgcctaggctggagtgcagtggctattcatgggcatagtcatcaagcactacagcagatgatcatattaagcaaggtaccgcactggagaagctctcagatacatgccacaggggaccgctcactgccaggctgtgtgaaaatgcagaaacttggagactctaaatgtccactggctggagaacggatagacacactgtggaataaccacgagggaaagccacgcagctgcggatgcgagtggagcctcgtgtgtcagtgtgaacggtactcacaagcagtgctcagcctaaaagtagggtgagcaggtgcggtggcttacgcctgtaatcccagcactctgggaggccaaagcaggcagattgctggagctcaggagttcgagactagcctggccaacatggtgaaaccttgtccctactaaaaatatgaaaattatccgggtgtggtggttggtgtctgtaatcccagctactcgggaggctgaggcaggagaattgcttgagcctgggagcgggaggttgcagtgagctgagattgcgccattgcactccagcctgggtgacgagagactccatctcaaaaaaaaaaaaaaaaactagggtacgagaaaccaagcaagaaagcacgtgatcctgttgacaggcagtgtggaccgccacacaaccctgcgtgttttggcgcagtgaacgtgcgcagtgaaggcacgccggccctgctctggcttccttgggatggggtgggggcacctgctcatctgctggtcattcttagctgcctttctggatctgaaaccctttatgatacaaccttcatgaggtgcctgaacaagggaggtgccctgtgccacatactggtgccgaccagcgtgtggcccagggaatgtgttctgaatgcagtaagaggcaacctctcctggaaggagggcgaccccctaccggctcctctgacagccgagtggactcctgggctccagaaacgtgattgcagcaggcagaccaaaggtctttctcctgccctccctcccagcagcactctttccttccgggccccaaagaccctccctggctgtgcagctgcccactatggaaccctcagccagtctagaggtggcacagggaccccactcaacagaggggcccactggtgccttcttctgacaggcacagagtgctctggggctagccggggaggctgctgtgggaaggctgggagtgggagaacactggaaaaatacacaggattctgcaagtatgaaataaaaatgtaaaagctagggcacagcgcagcattccagcggcctccgagccagcctctgcagtgggcagcacatacctcccagacacccacactacgctcagccaggggtccgacagctccaaggctcctcgtgggtggaacgctgacttgaccagagtcagcaagaagcaagatactctgcagttctgggggttgtccttccttcctaaaataatagcagggattctcaaccttagagaaaaccatcagaggcctcaggagaggatgaagatgatcttatgccagggtgggtgaaggttgggagatggggaaattccaaccaggtccctgggctgccctcttctgagccacaaaggctggccttgaagggccagggctgcccatctgtttcaaacaatcgggactctgatgagtgaggctgttaggctgatggatgcctgcctgagtcagctgtggggcctcatcccacagaggcgggtggcaagggattgcggcgagggcgggcagaaagttcccagagcttccttccgcagggggcttcctgagaataagggtctctgcttagtgctggggcaaagtcccgaaatgacagcagaaaaataatcagtcagcagttctgcttccagcacgcagggctggatgggggtgtcctggaggaagatatttgcattactgcttgggtgatgtttgggaactcttttttttttttatttctttttcacttttttttttttttttttggagaacagggtcttgctatactgcccaggcagatctcaaactcccgggctcaagcgctcctcctgcctctgcctccctcagagctgggattacaggcacgagccaccgtgcccaacaatgtttgggaactccttaagaatgctgactgctgggtctccagcttccatgcctttccccaggcactcaggacctggctgttaccaacccatcagccctctttcctgagcccaaatcccagtgtgcaggatcccccgatcctaagaggcgagactgcagagggcatggcggtgggccccaagggaaaaggcaacgtgccttccgtgaggcatttcccacagcgtggcagctaacacaagcataaggcacgtgaatcacgtggtcagaacacaactccgctgcaattccccttctgtatttctttttctttttcttttg[272 bp omitted]gcctggcccctcttctgtatttcttattctggcaagaaggaacttccaggtgggcactactatagtacaggctttgtttttgttttttttaggcagggtcttgctctgttgcccaggctggagggcagcggcatgatgatagctcaccgcagcctcaaactcctggacttaagtgatcctcccacctcagcctaccaagtagctgggctacaggtgtgcaccgctatgactggctaatttaattttttgtacagacggggtttcattgtgttgcccaaatgggcttgaacaactgggctaaagcaatcctgcctcagcctccctaagtgctgggattacaggcaagaatcaccacgtccagcccgaacagctctttcacaagagagcacacctcaggctcaggggtggggtatccagcaaaatttcactctattgttttgctgctgttgtatttgttattccacttactgtgcggggttttttgtgttgttttgtttttgaggcagagtgcagtggtgctatcttggctcaaggcaaccttcacctcgcaggttccagcgattcgcctgcctcagcctcccgagtagcggggat[131 bp omitted]gagttcaagcgattctcccgcctcagcctcctgagtagctgggattacagccatgcgccacccacgcccagctaatttttgtatttttagtagagatggggtt[132 bp omitted]aaataccacgatcccctttaaaatacattttaaaagtgataaaataaaagtaatttaagaggaaagaggccgaatcagctaatgggttcaagctgaaggacaggcgatgaaccctggctgtcatttcagggcatcaccgctggccagctgcctgctgtggtctgcgagtcgtgggagtgtcacatttgaacgctgggacaggggacgcaggcttagaagacaggtacagagaggggcagcggaagcacaggagacagcaggctcagagacagaaggggccatccacagggagaagtgggaggagccgcagggcctattgtggcaatcagagagaagtcactgcagcaactgggcacagaggccagggagagagctgcaggatgggtggccaggcccagccatggcaaaagtcctaagaatcttggcaaacagggctggggagccagtttctggaggctgggagtggtttagtttggggaagcattcaagccagggaaccaccaactctgagcagaccggcccagccgggcagcagcaggtgcatttcagcctggcctcgatcaaggggggaagcaggcgtctgggcttggcttcttagggaccctgctcaggcaggctctgggtcagagactgcctgtgacacagtcaggccctcggacctggccaagttcaggtgactgtcagctgcagccctggagctggacacacaccctaaaccacaggagacactctctgagctgttgattttttcagagcagtcggacctgttcccaaccgagttctccgaggccttgtcagccacctgcctccctggtgctgtgacacggcctggtcagatgcctggccagcggaccaggggctgctgttgagccaccaccagggacaccacaggggccctgtggaggacagcccctcactctgagaaggagccctctagctcagcctctgtagggggcgtctctggcaacctcatcagcaggccagtgcccagcagaacatggcccatcacacatgcccgagcacagcccagcctcaggagctgccgtccgatgggaggagagcacctcacacgaacaccagcgtgtggcatctgggtgggggaccccgaggccagaagctccaagggctgagaactcagttcccacatgcatccccggaagatgccaaggataaggggagatagaaacgcgttcgttatagggcagacaggaagtggagagaaaatgaggttgggaggtaggagaggccggtgacatggacaggaggcaggagagtacagggccccacacagggtgggcgggagggactgactgtgtgagttcccatgcaggggaagagtagcatttaaacctgggaccaaggcaggggctccagaagctcccgaaattcggctgagagcttgaactgtaccctgggccaggtggagacctgcttctcttcctctagggcgtgctcacacaaactcgacacgaggccatccgctgtagggtgggggccacggtggcccatccgtccttccatgtgatatttaccggctccctggggcaggccagccagtaaaccaaacactggggatgcagcaatgagcacaaatgcctggctccggcggcaatgggctcatattccagtggcaacggcaatggaataatcactcccattggcatgaaaccatgtggggagctgtccacttgggggccagggcagaggagacgcatgttcccggcccagggaggggagtgggcccactcaccccatgccctcgcaggcctgatgccatctggattctgagtatctgccatgaccaccgcccctacagactgtgtcacacgcggcatgacccctgctgggtgcttcgtccccttacccaggtgtggaactgcggcccgctaggcgggagccccctcccaggcggtcagtgggccgctgctgagtcaggtccaatggaggaaactgtccgtctatcttcctgctgtggtgaggaggtctccccgtgaccctgctctcagggcctggtcagcaggtttttctaggagtggagaggaaaaggaagacagggccgtcctcccagagcctgagttcagggagccctgggtactgcttaacaggaaatgagcagaaacgcaccaagctgcagtgctcaggaaaagtgcttgccaaatccagccctgcaaaaggcgagagatagagaaagagagagacaggcaggcagacagacaggaagaaggtgtggagaggacagacagagagagaggaagaagaggtgagagggcaaaagaagggagagacagagagaaagacaagggaagagtgagaacagaaagagaggaagaagaggggggagagatagggagaggaggggagagaagggagagagggaaacccgctgcagccctggccaccacattctttcatccgctttccagggacagcttcgaaaaagaaccagaagagaccgccccctgacacttcagctcacacattaaaaagccattagagttggagagctcaggtcctgctgagatgcctccagagcctgttgagctcctgacacctaccccacccccaccccggggcaatgcttccccttccaaccctcccggcacttaaagacctcaggggcttggaaaagagaaacatggaggccgctctgagcttctcctctaagctctgccccgggcagcgccgaaacctgcggctgcctccgaaatcctactggggacgttggcagcatgctccaaattaaacacgacgtttccccagatcagatcagttgcaaaacactggaaacaatcacggaggaggaaaagggctaaggcagcagtgaaggcttggctgtaccctaggcccctggattaaagtccactggacacagagacacaggcaggtctgagcgggacgggcctcaacctgcaggtttctcctttgaggaaaaaatgcaacagacacacacacagacatctgaggggcccagctgccagctcagacctcaggtgcactgcgcacgtgacagcggccacccctgggtggccaggggtggggtgagcagtgtcatgttctctgtgtgcttgataggtctggggtgtcaaaatgtgacagcccccaatttcttcaactgagcggcataaggtgagacacctcatctcgcactcacaggctgttattaggggcacctggaatataattaagtactgcagagctgggctttaacacacacccagataagcagggcgatcagcacccacggagccccaactggtctttggtgaacacgggattctgagtcagagacaaacttttagccgaactttcagcccttgacttgttctgggacctactgtacagcagtcacgggtggcagaaatcggagtctgatgaccccttggtcctggtttgttaagaatgggaaaacgtaggatgctgcttggttacaaagtgcccagtgaccaccaacagccaaccctgtgaagggggccaggtgagccaggtttcacagacaggcccggggagccgtggggtgtaaggagcctctagcttcctttggggaaaggcagtctcaaacttctgtgtctgcacagcccagctggcacacagttcaggcctccacacagctgctggttccacccgtctgcaagccagaaacagagtgagccctgcctgtcctggggtggcccagggtccacgccgccggctccaatgccggctccaatgcctcaaggcacacaccagtacatgccgcacgttcctggattcagtcaccagagcttcctgcaagaacggacttaactccattcccatcatacgtggacatcacaaagcaaagtcccttcctacatctgttgccaacacctccccgagggagagggggcttccggaggtcagcctgcagctgctggactcaccggccttgtcccgggcacagcctctgaatcaccaacgccggcccttaccagcccacacaaaagtgcctctcaactacctgtcactcccagcacaagggtatacacttttatctgtgccaa[135 bp omitted]gatgaaaccctgtgtccactaaaaatacaaaaattggccagctgtggtggcgcacgcctgtattcccagctactcaggaggctgaggcaggagaattacttggacccaggaagcggaggttgcagtgacctgagatcggcccgctgcactccagcctgggacagagcaagactccgtcacacacacacacacacacacacacacacacacacacacacacacacacacaaaagatcattccatgtttatggcttaacaagtcaagcactttggtaggaaaaccaagagtggccccacaaagtgaggttttaaaaaagaggtcagggccgggcacgtggctcaggcctgtaatcccagcacaatgggaggccaaggcgggcggatcacctgaggagttcaaaaccagcctggccaacaaggcgaaaccccgtttctactaaaaatacaaaaattagctgggcatggtggcaggcacctgtaatcccagctactcaggaggctggggcaggagaatcgcttgaactgggcagcagaggttgcagtgagacaagatcgtgccactgcacaccaccttgggagtggggacagaacaagactgcatctcaaatacgtaaaattttaaaaaatcataacaacccgggcgtggtagctcacacctgcaatcccagccctttgagaggctgaggcaggaggatcaccacctgaggtcaggagttcgagaccagcctggtcaacacagcaaaacctcatctctactaaagatacaaaaatcagctgggcgtggtggcacatgcctgtaatcccagctacttgggaggctgaggcaggagaattgcttgaacccaggaggcggaggttgcagtgaggtgagattgcgccactgcattccagcctgggcaatggtgtgagactccgtctcaaaaacaaaaaaaacaaaaataacaaaacaaacaaacaaaaaaaaacaccatcataaataaactaaaaaaaggtcagggccaagcacagaggctcacgcctgtaatcccagcactttgagagaatgaggagacaagatcacttgagtccaggagttcaagacctggagtggtggggtttaaggagcctccagcctaggcaacatagtgagactcagtctctacaaaaaaattaaaaaataaataaaaataggcgaggcacagtggctcactcctgtaatcccagcactttgggaggcc[268 bp omitted]ataaaaataaaaataggtcagaacaagcagtatcgttgacattctgaaacaccagccatgtcccagacactgcttactctgacctacagcccccaaataggtggggcccaggatcccccggcagacagtcctcccccaacccccctggcctctccttttctcctaggcacaaacccagggcctaaggagcatcaggcagatttcaaagctatgggaggtgacgcttgtgaatgtccctcctagctcagtctgaagcaatctttccattcaaatgttcaaaccctctccctcctttcaggcaaaaaaaaaaaaaaaaaaaagccagcattccaggcagctgccagctctacccctagttacactctcaatctcacacagcccggccacaagatttatcaggaagccagttagcagcttaagcctggaaataatgtcacccaaacccccagcacaccaagggaacttctgagagcagctctcgctagcggcattctttcaccctccttagtcccccagttctagctgcgcacggatgccaggaggctcttgagggagtgggtgtcacacaggcagaaaggagggaaccagggagatgggaccatgacggacggctttttactgctttcttccagatgattcaactttccccagctcaggccctcaaccagtctatggccagttcatgacaagaagtaaaaactcacaaactgcccactcaagcccaaaccaattttgaacaagttcccaaaaggttttgcagggagatgaactagcctggaacccactaaggttcttaccattatcaccaacgagagatcagaaactcagaaccaacaacacagcctcgcctgttagaaagtaagtttatcttttccagcactctctcccgcatcctcccggcctctgttgatcaatttagaaaggacaccgtaagaacccttggaagtctagagcctggtttaaagcagggtttcttaagctcaactctactgacgtagggctggagaattcttcctttgcagcggggggaagctgtcctatgcattgtaggatgcttggcaaccatccctggcccctatcccctcgatgccatgagcattctctcccaaagttgcgataacaactgtctccgacattgccaagccaaggaaggggtctgcgccatccccggctgacagcgctgatgggcgcgtgcccctccttcaggagccccgatgcctgtggctctcaactattaaatcaagttccagcaaagaactggaaacctttaagctgtgtatggaaccattgtgtgtagcactggaaactgtcccttttctaagtcactgtaaatggtgtttttttttggagacagggtctggctctgtctcccaggctggagtgcagtgctacaatcagggctccctgcagccctgacctcctcaggtgcaagcgataaaggttcctcgtgatcagctggaaggtacttttgaattaaaggttcacactgaagaacctaagtggatagtggcatttgaggccagcagtgaaagtgtttcctctcaaagagttccctacacagcagcagacatggttattctgagagtcatgtatgttctgtgtttctctgtgaaccatgtttcagtctttgtttctgtcatcatatgtacgggaaattccatagagactacatcacacaaaactgacattgtcaattaccaggaaatacaggtgctcaccttttgaaggcttattcatacatatggttgccacaatacgtatatatgataaacagtgtatgtatacatacaagttgtttaggccaggcacggtggctcacacctgtaatcccagcactttgggaggctgaggcgggcagatcatgaggtcaggagttcaacaccagcctgaccaacatggtgaaaccctgtctctactaaaaatacaaaaaaaattagccgggtgtggtggcgcacctgtaatcccagctactcaggaggctgaggcaagagaatcgcttgaacccgggaggcggaggttggtctcagtaagccaagattgcgccactgcactccagcctgggtgacagagcaagactctgtctcaaaatatatatatatatatacagttgtcacaatatgtatatgataaacggtgtacatatacacataaaatgtttatggtggatctagctcccccctaaaaaagaagcccagatactgaaagacactcgaattttcctaaagacttgagggtgggctcgaccttagggtctggatgctgagttttatgtaaatatctacctgtggggcggggtgccatggctcatgcctgtaatctcagcactttgggagactg[136 bp omitted]gaggcaggagaattgcttgaacagaggaggcggaggttgcagtgagccgagatcgtgccattgtactccagcctgggcaacaagagagaagctccgtctcaaaaacaaacaaacaaacaaaaacaaactacacatgtggctatctgtgtttagcaaactaggaaaatctttgttttattttatattttactttttttttttttgagacgaagtctcgctctcatccaccaggctggagtgcttcccaaactgctgggattaaaggcgtgagccaccacacctggccaaactaggaaaatcgtaagaatggctcagtggggatttttttgttcctttgttttggtataattatcctcattttttttccaaatcttcaagcagggtttctcaaattttggtactattgacatttggggccaggtaattcttgggggcagtggggagatgctgccctgggcaccggaggatgtccagcaatatcgtctacctactagtagccagcagcaccgcaccaagctgtgacaaccaaaaaggtcccagacattgtcaatgtcccctggaggacagaactggccctgttttacaggaagataaatgtcccctaatccttttgtgtaaaagggggaatgttttttacccttagaccggataagcaagaccagctgagacctactggtataaagcatactgcctgctcacatggtgagaactcaataaatgtttgtatcactacgtaatgagagatcccgagagatgtcactttccaacaggcacagcagagggtgaaagagttgttattagactaaaaacaaaaaaagagacacaaatagtcggatacgtccagataacagctgagatgtcagagggaaccatggcaatgatcacagaagagcatggaacgcagccagggtgacttctaagagcacgactcaggacagaattgaccaggaggccaagacgacagccccgagggtgggctgtggccattgtgctttgggactaggcctcgggatgtggaaataggcaatcctaagcccagctaacaccacactgtcctttccaggcttcaaggcgccattcacagatctgaacgcaggtcatcctgcttcccttgagagagacaaagtcctggtggccggcacaagaggcctggttcattcctctaaagagggtgtcagctcaggacaatatgggcacaggccctgatcgctgggagtgggggtggtggcttccagagacctgtctatagcagggaacaaagtggcccaggaattcctccaagacctctgaggacatctttcctgctagggagcagtactctatggtgctctaaccaagcaggtgaaggtctgacgcctgctgggcaaggtctaacccagggccaggccatctgatttcaaagtgctggggcaagggggtgggactgttctcagtgacaactctaaaattcgtctggattaaatctttctccagggtttaaccatcatctggggtgtagagatagaccctaagtatctatatccctaaacaaccactagggttgttactttttttatttattttttgagacagggtctcactttgctgcccaggctgaagtgcagtggcacgatcatagttcactgcagccttgaactgctgggctcaagtggtcctcctgcctcagcctcccaagtagctgggactgcaggtgcacatcaccacacctggctaactttttcatattttgtagagatgggatctccctatatcgcccaggctggtcttgaactcctgaactcaagggaacccctgcctcagccttcaaagtgctgggattacaggcatgagccacagcacctggcagggtccttacttttttctttccaggggcaaaggtacctgctgggtgttactggggactcgtttctctttgctcccactgggcatctccgaactgtgggcagagaaccctgtttgccaccttggcccaagcatttgctaagatcattgctcattcctcggtggactctatctacacaaattccacacaacctcaccctgcagtacacggaccaataggattcaacaatctgaggcttcttgtctttttttttttttcaagacggagtctcgctctgtcacccaggctggagtgcagtggtgcaatctcggctcactgcaacctctgcctgccggattcaagagattctcctgtctcaccctccttagtagctggggttacaggcaaaaatacaaaatttttgtattgttagtagagatggggttttgccatgttgcccaggctgctctcaaactcctggcttcaagtgatccgcccgcctcggcctcccaaactgctgggattccaggcatgagccaccgcgcccggccaaatttgaggcttcttgcattcgaaattgcaaagtgaaaattttaaatgtgcccagttttctggagagtggatccacagctttcaccagattcatgagcagtgggccctggagtttccaaaaaaaaccctttatctgtccatatcaaatgcacttaggctgggatgcagcattctacttctgggaattcatcctataaaactaatcccactggtgagcaaagatattcactggctatttattgtagtaatggtaacagaaaattccggtaaacaatagagatatctatcaactgacaactggttaaataaattatggtatatgtcatggaatgaaatacaatgtacccattaaaaagagccaagtaggccaggcaggtggcttacgtcgataatcccagcatgttgggaagccgaagcaggcggattacttgaggccaggagttcgagaccaccctggggcacatggagaaaccctgtctctgctaaaattacaaaaagtagccgggcgtggtggcgcatgcctgtagtcccagctactggggaggctgaggcaggagaattgcttgaacacaggaggcggagcttgcagtgagccgagattgcaccactgccctccagctggggcgacagagcatgactccctctcaaaaaaaaaaaaaaaaaaaaaaatccaagaagtgtggagtatggtctagagcagtagtcctgggggacaggaaaggaagggaggaaggaaagaagagaagggagggagggagagaggcaaggagggagggaggaaggaaggaaagaaggaaggaaggaacgaagggagggaaggaggactgattctaaggggacacacggtgatgtctcaagatatttttggttgtcacgacttgggggtgctcctggcccggagtgggtggaggccaggggcgctgctcagcaccccgcagtgcccaggacggccccaccacggagaacaatccagccccagatgtcaacagtgccgacggagggggagaaatcccgctccagtgtgatctccaagcaatgaaaaacacagcacacaggattctgtggcatatgctatcacagggtacgtgtttttaaaggaaaggcacacacgtatcttaggaaagggacatacggagtcgatgacagtcgcttgtctctggggagaagggctggctgcccgaggagcagagaggggaaactgacttcttcctctaccttttcaactttgtaccttgcccatccagaggattttgaacgtaactgctctagacgcaacttttccctggctctgggttatctggcaagagtcctgtgtcgacagcctcgggactcctctcttccccttctctccccgcaccccgcctttgcagcggagagaaggaggggagaggtccgcgtccctgggcagcccagggtgcctctcccctcctcccaggggctctgtccccgcttctggagcccgcatggcgggcagggcctgggccacctcgtcgcccccgtccgtcccttggtcttcccacctggcaggggacacgcgccaacgtccccacctcggtccccccggccccctcccgggccaggtcgggcctggctccctcatccgggcagcccggggcccggtactcggctcccgcctgggcctgcgctcacctggctcgccttgtagaactgcttcttcagccccgccaccgacatgctgccgcccgccgccgagcctcccgcccggaccgcgccagcgacaggctcccgggcgccgccgaccctctgcgcgcctcagcagtccccgtcggcgccgcctccgccacccgcttgccagctccgcgcccgccccggcgccgcctcagccgctcgcgcgcccgcgcggccaggatattacatggcaaccgcacgcttccggtgccggcccccgcgcgcgcccccggcccccgcgcgcgcccccggccccgtctgcgcacgcgcgccctctgccggctgaagagcgcacgtgcacattgtctaccgcgggagaggccgcctctgtcagtgagttgagcggggcgagcctagaggggccgtagcagttgcagcgccccctggagtcgtggaggtgaccctaacgtcttggaaaacgcgcttagtttaaacctggccagggaggttgggaagtagaaggggcccctgcttacgattcttcagattcctgtttactcatcttagctaaatccagttcgtctaagtgttcagccccctcccatttttatttatttatttattttttttttgagacggagtcttgctttgtctcccaggctggagtgcagtggcgtgatctcggctcactgcaacctccgcctcccgggttcaagcgattctcctgcctcagcctcccaagtagctgagattacaggcgcgcaccaccatgctaggctaatttttgtatttttagtagagacagtgtttcgccatgttggccaggctggtctcgaactcctgacctcaggtgatccaacccccaacccccccaccaaatccagcctcccaaagtactggtctcacaggtatgagccaccgtgcccggccacctctcttcctctctctctctgtcctgtgttcatccattcagttgcccacgtgacacatctagacatctaggtctgtcttcatgccttgaccatactttccaccagtcctcccctccaattcttcc[140 bp omitted]ggtgaaaccctgtctctactaaaaaatagaaaaaattagccggacgtggtggcgggcgcctgtggtcccagctactagggactccgtctcaagaaaaaagaaagaaagaaaggaaggaaggaaggaaggaaggaaggaaggaaggaagaaagaaagaaagaaaacctgtttctacactcacaggctgacactgaagttctctgttttgtgtgaggcttttaatctgcttgatctacacagttcaatcaaatatttatacattcactcaaacatttattgacctggtaaatatgatcagttactaacaggtcctggggttccagtgaggaatgagtcctaccctcgccagaactaatgacaaaaggcagaaattaattcattagtcaaataacaaactaataaatagacacagctgtaattgctttaaggaaaagaacagtgttgtaggcacttgatattgtcagggttggggaagaaaaggcttcctggggtgacgatctaagatctgaaaagtataaattagccaggaaaagagctgcgaaaagattgttctaggcagagaaaacagcatgtgccaatttcctgaggattaaaccagaaacgatccatttcgtccatttcgttcactcattctacatgttatttactgaatgtcaaatacttccgaagcgctccccagacttcgttttattgttcttgtagaaagcaatttataattttaattgctgttgctatatttagccgatgtcccattaggataaactcaaaactccaggttcctcatctaaatcccactttcaagttgtcatctgcgccttgcgtaaaatgttctggtgacgtaagagcctgggcctccctcctcttagggactatcccacgcgatcagccagtcgcagcgcagagcaatgagcttgacacctccttcctccaatcgcagggcagctcctcccagccaatgacaggcctccgaggggaagcccagtccctcgcggatatgtcaatgggcgagccctgggaggaatggaagtcacggatctcgcgaggatgcccccggcgcccctcaattcccgaggcgggccgtcacgtgacccgggctcgcccaattggcgcgcggactgcgggggtcgccgcggttcccgccaaatacgagcgcggcggccgcggcggcagcagcggcgcgggcgggagggcgaagagcagcggccgcctgaggggagcccgcgcctccgccgcctgagaggaggtcgagctgccgccggggcgatgctggaggagctggagtgcggggcgcccggcgccaggggagccgccacaggtcggttcgggcccgcgccgaggggaagggggggcgcggcgcgcggcctggacgggccgaggcggcgatgggaggcggacgggcctccgggcgccaagcctggtcctgcgggccgggcgttcaccccctggggccttctcatccccagcgagggcctggcgtccccaagggcacccttgttgacgttattgttgtagccgcgaccatattgtttgtttccggcgcttttgcgtcagttcgtccctccaggactctctggggcggtgggtcggaggggccgagaggggaaactgaggcccagggaagcgaaagggcttgccctgcaggttactggatgcgtttgtgtcccttgaccatgttggaccttgcagcgggtggggaaactgaggcccaaggtcgcacgggctcggggaccagtaccgatgccgctgagggtcggggtaagcccgggtaagaagaggcccagatggtagagatggccaggagggtgggactcccgagttcttgctccttcctgatatgcaccgtgacttcctcctccgtgtgccttggaatggggtctttggagcccaccacaggcctcctgaaacgtgggagggtgaaccaaggaagaccagactgtccctctcccttgctggactctgcattacataacgctttggcagcacttggcattacgctttggcacatagtaggtgctcagtaaataacgtgaacgaatgaagggctagaatggacgccagtccagtttctcagcctcagcagtgttgatatttgttgccgtcctgggcacggcactgcagggtgttaagcatcatccctggcctccgccttttgcaggccagtagcagcccctctcaccatgccttagtaacagccagaaataccattgccctgtgtcccctatggggcagattccgccttggctgaaaatcatggctgtagttccttctagcctgtgggatttcccggagacataaaattaatataaagttggtactgtcgtggagctgtgatgttttaagtcaggatgtttaactttatttatttatttattttgagactgagtcttgctctgttgcccaacctctgcctctctggttcaagcgattcttctgcctcagcctcccaagtagctgggattacaggcctgcaccaccatgcctggctaatttttgtattttttagtagagacggggtttcaccatgttgggcaggctggtctcgaacttctgacctcaggtaatccacctgcattggcctcccaaaatgctgggattacaggcatgagccaccatgcctggccaggatatttaactttaaaaaaaaaaatcgctactcgctaggaccatgctatcatgaaaggaaagtatattttagtgccaaataaaattagaaaggatgtaatcgcagaataaagagcagttagtaactttatacacacatatgtgttaatcgtgtgtatctttggatctctggattgggagtgtcccgttttatatacaagattttttaatgagggtgggtcctgtttttaatgaggttgtttctgttccacttgcaccaaagctagtgactcaaagccacacaaatagatttttgtgattgtctcgaaaataaagttaagtgactaaaaatcatatccttcagttagggggtagaaatccatggcttttggtaagtggacacttgagaatgatactgtctttatttctttgaagtggctagaaaggaaacatgaattttctcagtaccttttcttattcactaagcttggggcggtgggtgaggggtggtttcatgtatggacgatggagttttttaggaagccccagtctgcttttaaaaagtactcacttttatgtaatgcttacaaaacatacgtagattaaccaaaataactaaactaggttttgccaagccagatctcctggtaagtgtgagcttcctaaacttactctgtttaaggtatttatctaaagactcgcttctatttatgatcactgctgcatctgctttgatattattagatggtttcttgagattttttttgcaggaaaatattttgtcttatcttctcttgacagcacttcagctcctgcctggcaagctcaaagtgctttaaattgtggtaccttcatgaattctctttaaaaagaaaaggatcccttttctgattttacagatttggtggtggtatgggggcttgggttggaggaagatgtttggggatcatgggaatgaaataggtaatctgatgttttctctcctccctacttttactcattccactttcatttcatgaaacagttccggttactctcttagttggctttctgatttattccagaccctaaccaggtaccataggtgcagcatggaacaagtctttctgctgtcatagagttggcattttgtttccagagagacgtaataaacacgaaagtttcagattaaatgccacaaagaaaataaaacaagacatgacagtgtctagggtaggatttctcaacctattaacattttgaggccaagcgccgtggccagcactttgggaggctgaggcgggtggatcacgaggtcaggagttcgagaccattctggctaacatggtgaaaccccgtctctgctaaaaatacaaaaattagccgagagtggtggcatgcgcctgtagtcccagctacttgagagagtgaggcaggagaatcgcttgaacccaggaggcggaggttgcagtgagctgagactgtgccattgcactccagcctgggcgacagagtgagactctgtctccaaaaaaaaaaaaaaaattttttttttttggcccatataattcttcattgtggtgtgctgtgcattgcattgtgggacatttagcagaatccctggcctctacccactggatgtgaatagcatccctttgagccctccctgcatcatgacaaccaaaaacatctctagactgtgtcaaatggcccccgaggacagaggggtcagaattgcctccaccttgtacataattggctctacatatgtatttgctaacttgattatttgcagaatttaacagtttaccctttgacacttttatttgcagccatggattgcaaagatagaccagcttttccagttaagaagttaatacaaggtaattatttggaaatgggttaaagagttgttcgtagtttatagtcttccttgtctcttgttggagacctcagtggaagcctggagctagaggggagagaaacagtccttcttcagaccaggaagctgggaaaatgcttttcacacagtaatgtctcgtggggttcccacaagtaaaccccgaggcctccacttatgcacgattggtgttttgtaacttgcagctgggagctctcctgtatgttgtagggagcgtagcagcatccctggcctcttcccaccggatgccagtaagtgcatcctccaagtcgtaacaaccaaaaatatctctatacgtggctgatgtcccctgggaggtagaactgccccctcagagaaccactgttgtcctggaagataaatgctcccaaatccttctgcataaaacggggagtgtgttcacccttgggccagatgagcggttggattgtaatttttttttttttttttttgagacggagtctcattctgttgcccaggctggagtgcagtggtgcgatctctgctcactgcaacctccgcctcctgggttcaagcaattctcctccttcagcctcccaagtagctgggattacaggcgcgtgccaccacacccagctaatttttctatttttagtagagatggggttttaccatgttggccgggatggtctcgatctcctgaccttgtgatccccctgcctcagcctttcaaagtgctgggattacaggtgtgagccaccgcacccggcccagattgtatttttagaaactacagttttgggtttttcaaacttgggctgggtgcagtgttgcatacctgtaaaaccagctatttgagaggctggggtgggaggagtgcttgagtccaggagttcaaggctgcggtgaattataatgacaccactgctcttcagcctggatgacagaggaagactctgtctcttgaaaaaaagggggacgccagatgctaggctcacacctgtaatcctagcactttgggaagctaaggtgggcggattgtctgagctcaggagtttgaaaccagcctggccaacatggtgaaaccccgtctctactaaaatacaaaatagctgggcatggtagggggcacctgtagtcccagctactcaggaggccgaggcaagagaattgtttgaacccggaaggaagaggttgcagtgagccaagggtgcgccactgcactccagcctggtgacagagcaagactctgtctcaaaacaaacaactccccccacaccccccccaaaaaaaaacaggtttttatttggtctattacatgatgaaatagttaataaaagatgcaatggcattgaagtaagtgaacataggttctttgggaaattcactctccaaagtgtttctgtgttcctcctaaccagcccgaagcctggcagactctgggagaacagtttgattgatgagaaaagcctaacagagcctagggtgctgaggccaggagaaaaaaaaaaaaccctgtccacaaatgtgtctatattttctacttgagaaccagatgcagttattatcaaatgagattttcacccattaaaaataaatttggaatatgaactgcatctgaaataaacaaatgtctcttgaaattctggcgatggctctgctaaaaggcttgtcaggattttgttttttaagttaggatgttgaagcggggcatggtgactcacatctgtagtcccagcaccttgggaggtggaggcgggcagatcacctgaggtcaggagtttgagaccagcctggccaacatggcgaaaccctgtctctactaaaaatacaaaaattagctgggtgtagtagtgcatgcctgtaatcccagctacttgagaagctgaggcaggagaatagcttgaacccaggaggtggaggttgcagtgagctgaggtggcgccattgcactccaacatgggtgacgagcaagactgtctccaaaagaaaaaaaaataagtaaaattaggatgttagaaaaggatagaatgaaaagatagcaccccccaccccctctttttttttgagacgaggtcccttttgcccaggctgcagagtagttgcaccaccacagctcactgcagcctctacctcctgggctcaagcgatcctcctgcctcagcctcccgaagtgctgggattatagatgtaagtcagtgtacctggcttcagatagcccctgccccgtcttttttttttttttttcttttgagagtttcgctcaggtcgcccaggctggagtgcagtggcgtgatctcagctcactgcaggctccgccccccgggttcacaccattctcctgcctcagtctcccgagtagctgggaatgcaggcgcccgccacctcacccggctaattttttgtacttttagtagagacggggtttcaccgtgttagccaggatggtctcgatctcctgaccttgtgatccgcctgccttggcctcccgcacccggccttttttttttttttttttttttttttttttgagagggagtctgtctctgtcgcccaggctacagtgcagtgttgggatctcagctcacttcaacctctgcctcccaggttcaagcgattctcctacctcagcctcctcagtaactggtattacaggcgtgtgccaccatggcctggctaatttttgtagttttagaaaagacggggtttcaccattttggtctggctggtctcaaactcctgaccttgtgatctgcttgcctcggcctccccaaagtgctgggattacaggcatgagccaccacacccggcccagatagtccctttttaaactttaaaattatctcccacccccatgtcccaacaaatcagtaattttcaagctcatgagtggttgtaactttaaacgttcactagagatggctttctgtctttgtttcagcccgtctgccgtttaagcgcctgaatcttgtcccaaaggggaaagccgatgacatgtcagacgatcagggtacttctgtgcaaagtaaaagccccgatttagaggcctctttggacaccttggaaaacaactgtcatgtgggttctgacatagactttagaccgaaacttgtcaacgggaagggtcccttagataactttttaagaaatagaatcgaaaccagtattggccagagcacagtcatcattgatttgacagaggactcgaatgagcagccagacagtcttgtggaccacaataaactaaattctgaagcctctccctccagggaggcaataaatggccagcgagaagacactggggatcagcaggggttgttgaaggccattcagaacgacaagttggcatttcctggagagaccctttcagacattccttgcaaaacagaggaggagggtgttggctgtggaggtgcagggaggagaggcgactcccaggaatgttcgccacggagctgcccggagctgacgagtggcccgagaatgtgccccagaaaggagcaggacagttggagtgaagctgggggcatcctgttcaaagggaaggtgcctatggtggtcttgcaggacatcttggctgtgagaccaccgcaaatcaagtcccttccagccacaccccaaggcaagaacatgacccctgagagtgaggtgctggaatctttccccgaagaagactctgtactcagccattcgtccctgagctctccctcttccaccagctcgcccgaggggccgcctgctcccccaaagcagcacagcagtaccagtcccttccccacctccacgcccctccgcagagtgagtatctcccatggagtccctgcacatcagtgctcacggatctcagagcgctgtcagtctccactgggtcacccaggtgttttgtggcagagtgagcggggccacgggctgggtcctgggactcgacgtggagttcttcctggtatcaaaactcacagtgttcagttctgcattcgttgtgatgcccctgggacttaattcatcaacagtgtacctggtgtactgtgtgaataacaccctgctgttttgccttcgttgttcacatctaatcagtgatagcttagccgttttagggaattaggatctgagctggtgctgtaacccctcacttcagattcgaggtccagctttctctgtgcccttcctgtctaagcatagaaatgtagggacggggctgcaaagacactgagcactgaagtggcagtgagacggcaggaagcatgacttggggaattctgtagggtcagcacagccagccatcttaaaaaccttacctggggccaggcacagtggctcatgcctgtcatcccagcactttgagaggccgaggtgggaggatcgcttgaagatcacttcaaaaccaacctgggcaacatagacaccatctctatgaaaaaaaattacttttttttttttttttgacagagtcactctatcacccaggctggagttcagtggcgtgatctcggctcactgcaacctccacctcccaggttcaagcgattctcctgcctcagcatccctgatagctgggattacaggtgcgcaccaccacacttggctaatttttatatttttagtagagacagggtttcactatcttggccaggctggtcttgaatttctgacctcaagtaatctgcccgtcttggcctcccaaagtgctggaattataggcatgagccactgcacccagccctgcaaaaaaatttttaaaagttatccaggcatggtggcacatgcctgtagtcccagccacctgggaaactgaggcaggaggatcacttgagctgaggagttggaggccgcagcgagctatgatcacactgccgcgctccagcctgggtgacagagcgagaccccatctggaaccatttttaaggaccccataagggggacttttgcatggtctgtctctgttattgattttttattagcacaatggtgtccttaaggtcttagggaccaaactgataaaatcagtcacgagtcccacggtgtttagtggtgtcttttgattttataattttttactttttatcttaagtatgtagaaccagaagagacagtgcctttttatgtttttggttttgtagcacttttgtttgttcatgttgggtctttatatgagagtagtagatcctgagatgggtcatttaatctgtacctgtaagcaggtacagtagaccacctggaccataaaccaccaaccttgttcgctttcgggattttgagctctaaggaaccatttatttatttatttttgagacagagtcttgctctgtcacccaggctggagtacaatggcgccatctcagctcactgcaacctccgcctcttgggttcaagcaattctcctgcctcaccctctcaagtagctgggattagaggcacccgccaccatgcccagctaatttttgtatttttagtagagacggggttttgccatgatggccagactgatttcaaactcctgacctcaggtaatccacccgccttggcctcccaagtttctgggattataggcgtgagccactgtgcttggccaagagcatttatttttctgaatgacttcatttcttgtctttcacctgagaagatgaaaaaggaaaaaatggcttcctctttaggtttatgaaatgttgtaaaaatggtgcaaatctttttttttttttttttttttgagacatggtctcaccctgtcgcccaggctggagggcaatggcatggtctcagcctactgcagcctccaccttctaggttcaagcgattttcctgcgtcagcctcttgagtagctgggattacaggtgcccaccaccacgcctggctaatttttgtatcttttcagtagagacgggtttc[133 bp omitted]atataggtaaactcttgtcgtgggggtttgttgtacagattattttatcactcaggtactaagcctagtaccctcttctaagttactaaatgtgccagactggcatgtacacatttcagcttctacctaatccaccactcaatctcccaaaatcagagttgaagtctctccccattgggcatcctgtagtgtacattcgatcacttgaatttcttccaggctgctgccgctttgcaaaatttcgtcctgtgatgtgagccatttagcaagaacgggacacatggctgggcgcggtggctcacacctgcaatcccagcactttgggacgccgaggcgggtggatcacctaaggtcgagagttcaagaccaggctgaccattatggagaaaccccgtctctactaaaaatacagaaaattagctgggtatggtgacgcttgcctgtaatcccagctacgccggaggctgaggcgggagaaccgcttgaacccaggaggcagaggttgcggtggcctgagatcgtgccattgcactccagcctgggtaacaagaacaaaactccgtctcaagaaaaaaaaaaaggacaggacacaagcacatgtttccattaagtttgtttccatgtccacagcttagtctgcaaactgggaagtcccctcgttgggcatcatggtggcacaatcctgcccgctttctaaaacaactgagcacatgaacccagtgtgcaacatttaggaaaccctgcatttaggacgctagatcttgttctgaacacagactcgaggttttgggatgcacttgaaggcaatattatcccaacttttcagataatttacaagtggtaaaggcttcaggctggcccagagcctatggcagaaagcggccacaaccacccgcagagggcctgtcagtcaccgaagctatgagggaagcgattatcgggaggcctcctcatgccctgatggcagggatccctgagatcccagctgagagagactccatccccaacccctactttatctccgaacctttaaggagtcctgcatttctggtttggttggtttgcttgcttcatagttggtacctaactcttttttattttttattttttttgaggcggaatctcactcttttgcccaggttggagtgcaatggcgtgatcttggctcctgcaaccgctgcctcctgggttcaagcaattctcctgtctcaacctcccaagtagctgggattacaggcacgcgccaccaggcccagctaatttttgtatttttagtggagatggg[135 bp omitted]ttgccgtgacgtccaagccacccccttcccacaacccctgttcctctggggaatacactgtttttgcactttacctccctaccagcagctctttccagattgcaggggcgagctggtgggaagcttgcagattgtttcgcactgccgtgtaatctgtgtgcttgtcactggggtctgttcttccttgagttggtacagtgaaatatgcattgagagtcccagggcagtcattgccactgtactttgtgggctggcttgccttctttattatttcttctttaaaataaaagaaaatgggagtttgttccgatacaggtcctgctgtccctttgcagggagcttcatggcgtgtttttgtttgttttggtttttgttgttgttttagtactgcaggatctggagaatctcactttggagaaacaatgatttaaaaagatccccctttagatactcccagggtcctttgaatagctgaagtgttcctttttagtattagagttttctaccatgtgggaaagaaccatttctgaagtttgcaatcagacttgtgatttagcctcttctgttagtgatcgagatgattatttgacaaatgatcatgttggtgcagttgtgttactggaatctttggcttgcttctgtgcccagattgctggaacttctttccatatacttgaaattacatttgtaataaattctccatgtttaaaagaaatactggtctaggtgcagtggctcaagcctgtaaccccagcactttgggaagccgaggtgggaggattgcttgagcttaggagttcgaaaccagcttgaccaacatggtgaaactccgtctgtacaaaaaatacaaaaaatagcggggcatgggggtgcacacctgtagtcccagctccttgggaggctgaggtggaaggatcacttgagccaaggaggcagaggttgcggtgagtcatgattgcaccactgtgctccagcctgggcaacagccagaccgtctcaaaaaaaaaaaaaaacaaaaaggaaaaagaatggaaaccttgaagccctctgttctcccaggaggttgccattattatcatcatcatcaccttgtgtttttctgtgtcctgtatatccagagagatctctaggaaacacccagtatcattttgtttccttgtgtatgacatatactgtaaatatctgtctttgttactcaagggtgtcttagatgttttttatattgggatggaaagatggagctctttttaacagctgcgtgatatcccatggtgtggacatgctgtaggttacagagctgttttctcagttctgctgtttctgtgcttggctttcacaaaatgattgttcccttgagcttccttctacaagtggccttgggctgttaaggagaatgaggtcttggtagctcaaggcaatgcgtgcgttcttattttcccagcttgcactctctcatgcttgggccaattggaggttttctcttttcccccctgcctccgctcccctgctgtcaggttttagcggcttatctggtctgggcttagaaattagataccctttagtataaaatcagagtccataggctctgagaggattatctgagaaagggtgcaggaattttcatgcccacacatagtgagctctgtcgcgactccttgggattgtcggtttttgtgttttggcttccttctgggatcctggatcacgtttttggcagttgagggtgctgtctgaccgggctccagctgggtagaatgtgggagtgttgcatagaattttgagagtgagatctataaacacttgggtcaaatttcaagaagataaagttctgtcagacttcaaggtccatctgagggtttggcaaagcaaaaaagataccagttttaaattaagcagtaattgctctgttttggttgttggatattactgagcgggctcttgccagtcacatcaagtctgttatctctggactcacagcagagggggggcattgtaagaggcaggagattctgcagctgagcttcaggcatgggcaagactaaggaactgaattccccgccaccccaagaccacattccgtattataatctctgaacacaaagggcagccccggagagctgcggctcccatattctgcagttaaatccctcagcgtgggggagaggcacacagccttggcaggcagagtagatgctggagagacagatgctttttctgcagcatttggtgaggctgcctcgggctggcatttctgttgccacattctcagcaaagactgaacaccctggcctgatctcggtggtgaaagagctcctgccaacacgggcagccttctcacaacggctcggcctttccctaaagaaaggtttagtccagaaaggactcagtgggacccaggtggaaaggctgtcttgagctcattcatctgaagcttttattctgtgagaggtcctagtcaggggttcagc[170 bp omitted]ggtggtgggcacctatagtcccagctactgggcagactgagg[139 bp omitted]accattgccaggaaaatgggcctttggtttttcagtcaacttcagtcttacactgcaagtctgcaatgaacccggagaactatttcttcccactcttaagcgtctcttcccattgctcttcacttctactagtttggttttcaggattccctgccccggtgggagatagcttaggccaaagtccagactccctgttcgtcttccttcctgggaccatttaggtggatggtgagtcacaccatggatcctattggtaattcctagtagctcatgctcagtttgaaggtaggtgatagaaaatattgtgccctagaaggtagaagtcctagaaaaccccagcaagtttcccttttgtcttaagctttcactccacattctaaaaagcagagttggctgggcgcggtggctcacgcctgaattcctagcactttgggaggcgaggcgggtggatcacctgaggtcaggagttcgagaccagcctggccaacatgatgaaacccctatctccactaaaaatacaaaaattagccaggtgtggtggcacacgcctataatcccagctactcaagaagctgaggcaggagaatcgcttgaacttgggaggtagaggttgcagtgagccgagatcgtggcactcgctgcactccagcctctgtgacaggagtaagactccatctcaaaaataacattaaaataaaaagcagagttgagctagacagaatgtaaattagtggtgcacaggaaaccagcctggagacatgttttatttgattaatttagtatctttttattttttttttagacagtctcactctgtcacccaggttggacagctcagtgcagcctcaacctcccgggctcctcccaccccagactcctgggtagctaggactacagatgtgcaccacaacacccgactaactaaaagctttttttagagacagggtcttgctttattgcccaggctggtcttgaactcctgggctcaagtgatcctcccgccttgacctcccaaagtgctgggattacaggcatgagccactgtgcccgtctgtgtccatttttaaacacctaaaaaaattcatatgaaattcctaatatcagcttctcttggagaaattggaaggaccagcaaatagggatctatattcctgtaagaactccatctcctttggacaggcaggtcctctctcctttgctacaaatccatcctctccctgtcgcccaggccagctgtcgctttttttttttttttttttttaagacagagtctcaccctgttgcccaggcaggagtatggtggcgcaatctcggctcactgcaacctccttctcctgggttcaagcgattcttctgcctcagcctcctgagtaggtgggattacaggcacctgccaccacgctcggctaatttttgtatttttagtagagatggggttttgccacgttggccaggctggtctcgaactcctgacctcaggtgatctgtctgcctcggcctcccaaagtgctggaattacaggcgttagccaccgcgcccagccttgtctgttgcctttatttctgagcttgccttgtttttcttgtgcttggtgtccttcactcatttctttatctgcctccgtagtctctcttgttatctaatcccagatacacacatgtatgcacacttactggagtttgtgaccctattatgacattttggttctgttggtggaaaaactgatcacctggaaaggtttctctttttctcgaagcaattgaaataacccgtgtttaaagataaacgtcttctgttttcagataactaagaaattcgtcaaaggctctacagagaagaacaagctcagactgcaaagagtaagacattttccctgaaatagaaaattaacctgctgtgctttttgcattaaatagtaagcaaagccctttgaagttcctttggtctagtttttacattttccccagccttctctgaccatcattttgattcctgcttcattttaagtacttggacttcatggtttgtggattgtgtcattttttggcttgctgagtgagtcctaaggttttgtgtgtggccttttctaagcttttatcaatagtgctaccactgtcttaatggttcagtatcccattgtag[143 bp omitted]cctcccaggttcacgccattctcctggctc[175 bp omitted]cctggccagtcctgtgtctttcacttattgctaagtgctataacatctgaatagcctctacactcgatgggtggttatcctttagtgactctctgcttagtctcctattctgtggggggcatcaccacgttttccacacagcaatgcagggggcttttgttttgttttgtctttgagacggagtcttgctctgtcaccagactggagtgcagtggcacgatctcggctcactgcaacctctgcctcccgggttcaagcggttcttctgcctcagcctcccgagtagctgggactacaggcacttgctgccatagccagctaattttttttttttttttttttttttgtattttagtagagatggggttcaccatgttgcccaggctggtctcaaactcctgagctcaggcaatcctcccgtctcagcctcccaaagtgctaggattacaggcctgagccactacacctggccgcaggggactttttacttattgcttaaaggttagagaaattgaacatcatgtcataccgaaacaaaccaaaactccagggaaggcctctgggctttgcctatgcagtgccagctcacaggaggggcctggtgaccatgggctctgcgtttactgagtgtttcctgagctccctgatgttcactgggcgtttcctgagcttcctgatggccacactgagtttttgtgtttcagatttggggttgatttttattttattacttttttttttattgagacacagtctctgttgcccaggctggagtgtagtggtgcaatctcggctcactgcagcctctacctcccgggttcaagcgattctcctgcctcagcctctcgagtagctgggattataggcacgagccaccacgcctggataattttttgtatttttagtagagacagggtttcgctatgtttgtcaggctggtctcaaactcctgacttcaggtgatccacccaccttggcttcccaaagtgctgggactacaggtgtgagccaccacgcccagcctgatttttatttttacagtttatctcattctttggaacaagagcacttttaaagctcattggaacctccgagtcccgcacaccgggttggggagcggagaaagtatccaacggcggctgaagaaatctgattcacctgcagtttctagaagccttctatttcctgcttagcaacagggtgggagactcttcacccagttatgtttatagtctccttgttcagtccagacggtcaccttcctcgtgtgtctcgtatatcagatgcagtcacacagcacactggcaggaaatgcacatcagacatcttccaggctgtgtctctgtggcttttgttaaagctaccagagatgtattggaacacatttagaatttttccttagagacaagggcagatatcctaacccaaactgaaagctgagctgtcaggctccagacgtgtgggaagcccatattggatgagaggtggtcctcatgcagtgttaggagcgggcacctgtggagctgggcaggtgagcgttttttttttttattttgagacagtctcgctctgttgcccatgctggagtgcagcggcgtgatctcggctccctgcaacctccacctcccaggttcgagcgattctcctgcctc[134 bp omitted]cggcttcccaaagtgctgggattacaggtgggagcctgcgcctggctgagcatgtttaacattgaacttcagattacgtaatgactgagtgtcccaggccactgccaagtctttggaatgaggaacgtagtgatgaagtgttacttccttaaagaatttgaaacaaggctgggcgtagtggctcgcccccataatcccacactttgggaggccaaagtgggaggatttcttgagcccaggagtttgagacaagcctgggcaacgtagtgtctctactaaaaagaaaaagaattcctgggctggttgcaatgggtcatgcctgtaatcctagcactttgggaggctgaggtggacagattgcttgagcgcaggagttaaagatcagtctgggcaacatagtgagactccatctctacaaaaattagccaggtgtggtgacaggtgcctgtggtcccagctactcgggaggctgaggcaggaggactgatttgagcccaggacggaggttgcagtgagccaagatagcattgctgcactccctccagcctgggcactagaatgagactctatctccaaataaataaataatgtttttttgttttgtttttcagacagagtcttgctctgtcacccaggctgcagtgccgtggcgtgatcttgaactgccttgtgggtttaagcgatccttgtgcctcagactcctgagtagctgggactataggtgtgcgccaccacattcagctaatttttttgtatttttggtagacttggggtttcaccttcttggccaggctggtctcaaacttctggcctcaagcaatttgtctgcctcagcctcccaaagtgctgggattataggtgtgagccccctcagcccagcaggattgtgttttaaatgaatcttatattgaatttcccacaagtaccaggacacagggctaattcttaacatttttctcatgatggaaggaagcataatggattatgaaaatcacttctgtggctgggtgctggggctcatgcctataattccaacactttgggaggctaaggcagaaggattgtttgaggccacgtgttcaagaccagcctgggcaacacagcaaaaccccatctctaggaaaattacaaaaatagctgggtatagtggtgtgtgcttatagcccctgctactcaggagcctgaggtgggaggatcacttgagcctgggaggtcgaggctgcagccagctatgactgcaccactgcactccaccatgggcaacagagtagactttgtctcaagaaaaataaaatcacttctgtgtaaagttgttgactggaggctcctcctggagctggtctctgaattcttatttattcatttatttttttaactgagtctcagttgcccaggctggagtgcagtggtgtgacctcagctcactgcaccctacgtctcctggttcaagtgattctcctgccccagcctcctgagtagctgggactacgggtaccctccaccacgcctggctaatttttttttttttttttattaaatggagtctcactctgtcactgatgctggagtgcagtggcaccgtgttggctcactgcaacctccgtctcctggtttcaagcaattcttctgcctcagcctccccagtagctgggattacaggcgcccaccatgcctggctagttttttttaaaaatatttttagtagagatggggtttc[137 bp omitted]cctgttgaccaggctggtctcaaactcctgacctcaggtgatctacccacctcagcctcccaaagtgctggaattacaggcgtgagccaccatgcctagccttggtccctcaattctgttcatcccgtccaggccgtgctgtcctccatgctgtgaaccgagcttcctcctgggagttggagggagggccacctgtcacttgccacactgtcttgtaggatcaggagcgtctgggcaagcagctcaagttacgtgcagaaagggaagaaaaggagaagctgaaagaggaggccaagcgggccaaggaggaggccaagaagaagaaggaggaagagaaggagcttaaggaaaaggagaggcgggagaagcgggagaaggatgagaaggagaaggcggagaagcagcggctcaaggaggagcggcgcaaggagagacaggaagccctggagtgagtgtccttggaggccatgctgggcccgccaccctgctgctggattccgctcctggccactctgatggggcctttccacttcacaggcagatggcggctcccttcagttccttcccatttctccttcgtgaggtgcccgtggggccctgacgtgggagcggtggaaagcagctccctgctctttagtgctcccccacgtccaactcaccctggaccccttgtctctgctgtgaccatccttccagttcccaaccaacttaggcatttgcattgcaggattgtgggttttgtctgtgctaattgtgctctgactggctaaagttttttatatatattctagtcacaggaagaattttattgactgttttccatttttattgtgaagacctatgtaaaagccttatactagacatgaaaataacttatattcatttaatgtaaaatgaaatacttgccatatactaacagttgagtgctgcggtcccttccagagccaaagcaaagagtcggctgaaatgtcatttgctgtctcacagggctaaacttgaggaaaaaaggaaaaaggaagaagagaaacggttaagagaagaagagaaggtagagtgtttcccacagagcttccccgtcccagcccgttggagaagcagatgcccaaagtggaattcttgccacagccgtcacctaatattctcttggtttggggaaaccaaatggcgcccgcagggagggcgagtctgtctagatgcgttcttgttgcttcttcccagtgctggctgtcacatgcctactggccctgcaatcctggcacttctacccacaagggcaacttggacattttgagattggctggctcagttgcgggtccgtgggttttgagagctgaaaatcacagtagtgccttcaagctaaaatgcttgacgttcggttctgggggcctttgcatgttttgcaacacatactgttcctcttcctctcctctttctcatcaccatctcttaacatcacagcgcattaaagcagagaaggccgaaatcacgaggttcttccagaaaccaaagactccacaggcccccaaggtgagcagccggctgcctttgcttttgggtttcagctctgctagacttttcctttctgaaagtgaaagggtctctccccagccagcttctctcattaggagggagggagcctccagtgacctagggcacttccatttctggttaagtcttgaggctcaatattttgtccttcgctttgtcccaaagaggtaaaaagtggcatgtctgattaaacagtgctgttttcagaggttacttcatgaataattttgtgttaggcgtaagagaaattcaccatgtttttacccttgggaaacttaggcttaaggagggagcacgtttagctgtaaaacaacagtacaattcacaaaggtttactttccctgcctggcgtcggtcacctggcatctcagaccttctgagccaccatctgtgcatggaaaccacagccctccttcccctttacccagagggagcccatctccaatgttaggggtccttcagtgcctttccctgctccactcactgtatttatacacatgtgtacttagctatctcagatttgtgccatgttgccacatttagatgtatttcattctttttaatgtatctggcctttatttattttttgaggcagggtctcactgtcacccaggctgtagtgcagttgcacaatcaaagctcaccacagccttgacctctcagggtctggtgatcctgtcacctcagccttcccgagtagctgggactacaggcatgtgccaccatgcctggctaattttttatttttattttttttgagatggagtctcactctgtcacccaggctgcagtacagtggtgcgatctcagctcactgcaacgtccacctcccgggttccagtgattcttctgtgtcagcctcccaggtagctgggattacaggcacatgctaccacacctggctaatttttgtatttttagtatagacggggttttaccatgttggctaggctggtcttgaactcctgacctcaggtgatccgcccgcctcagcctcccgaagtgccgggattataggcgtgagccaccgtgcccggcctaattttttaatttttttttgtagagactgggttttgctatgttgcccaggctggtctcgacgacctggcttcaaatgatcctccaaacctcggcctctcaaagcacttggattacaggtgtgagtccctgcacctggcctgtccttttatttgtatgttgagacatttgatggcaattgtgtatcctgaaggtgcacaatgtgacattgttgtacctacacatcatattgtgacagccagagatccacatcatgtattttcactgccgcataatacttcataatgcaatgatatggtttctctctttttttacaaaaattatttatttatttagagacggagtattgctctgtcacccatgctggagagcagtggcgctatctctcggctcactctaacctttgtctcccgggttcaagcaattcttctacctcagcctcccgagtagctgggattacaggtgcctgccaccactcccagctaattttttgtgtttttagtagagacggggtttcaccatattggccaggctggtcttgaactcctgacctcagatgatctgcccatctcagcctccctaattttatttttagtagagactgggtctcactgtgttgccagggctggtctcgacctcctggtctcaagcatttctctcgctttggccacccaccgtgctaggatcacaggcatgagccacagagcctgccactatctcaacctctttgcccctcagtggtgtagggggggtccctgcacatgcttctctgcacacatgcattcctctgggacagccaagtaagcatgagttcacctctaggacaaaatagcatattgctgaagcatcatgagccatggccagagtgcgtgccagatgggaaactcagatgtacattcccggcgatgtgtggaaatttcctccccattctctgctatcactgcaatttttatgggattaattttcttttaactttgccagtctgatggatttttaaaaattgacattgttttactttccatttttacttgactcttggtgcagttgagcatctttttctgttcgtttgccattttagttcttctatgacttgccaattcctatttttttacctatttttctacaggattttctttttttttctttgcctgatctgtaagttttttttaacatagtctagtatttcattctccgtgatatttcgtctcagcctgttacctctttgtttacagtcttttttttttttttttttgagacacagtttcactctgttgctgaggctggagtgcagtggtgccatctcggctcactgcaagctccacctcctgggttcacaccattctcctgcctcagcctcccgagtagctgggactacaagcgcccgccaccatgccccgctaattttttgtatttttagtagagacggggtttgcaccgtgttggccaggatggtctcgatctcctgaccttgtgatccgcccgcctcggcctcccaaagggctgggattacaggtgtgagccaccgtgcccggcctttgttgttttttgtttgtttgttttgagacaaagtttcgctcattgcccaggctggagtgcagtggcatgatctcagctcaccacaacctctgcctcctgcgttcaaatgattctcttgcctcagcctcccgagtagctgagattacaggcatgtgctgccacgcccagctaattttgtatttttagtagagacggggttttt[131 bp omitted]ccttttggccaggtgcggtggcttatgcctgtaatctcagcatttggggaggccaaggcgggtgaatcatctgaggtcaggagcttgagaccagcctggccaacaaggtgtctctactaaaaatactaaaaatacaaaaattagccgggcgtggtggtaggcgtctgtaatcccagctgctcatgaggctgaggcaggagaatcgcccaacccaggaggcagaggttgcagtgagccgagattgcaccactgtactccaggctgcgcaatgaagcgagactccatctcagaaaaaaaaaagaggagttgtgatctttcaaaaaaagaccctgtctttttttttttttttttttttttttttttttgagaaggagtcttgctctgttgcccaggctagagtacagtggcgtgatctgggctcactgcaacctctgcctcccagatccaaacgattctcctgcctcagcctcctgagtagctgggactacaggtgcccaccaccatgccaagctaatttttgttttgttttgttttgttttgtttttgagatggagtcttgctctatcccccaggttggagtggtgcagtggcacgatctcggctcactgcaacctctgcctcccaggttcaagcaattctcctgcctcaggcccaggctagagtacagtggcgtgatctgggctcactgcaacctctgcctcccagatccaaacgattctcccgcctcagcctcctgagtagctgggactacaggtgcccaccaccatgccaagctaatttttgttttgttttgttttgtttttgagatggagtcttgctctatcccccaggctggagtgcagtggcacgatctcagctcactgcaacctctgcctcccaggttcaagcaattctcctgcctcaggctcccaagtagctgggactacaggtgcatgccaccgtgcccggctaattttttgtattttagtagagaccgggtttcactgtgttgcccaggctggtctcgaactcctgagctcagacaatccacccgcctcg[134 bp omitted]cagcctcccaaagtggtgggattacaggcatgagccactgcccctggcctaatttttgtttttagtagagatggggtttcaccatgttgggcaggctggtctcgaactcctgacctcaggtgatccgccttcctccgcctcccaaaatggtgggattacaggcatgagccactgcccctggcctaatttttgtttttagtagagatggggtttcaccatgttgggcaggctggtctcgaactcctgacctcaggtgatccgccctcctcagcctcccaaagtggtgggattacaggcatgagccactgcccccggccttttttttttttttttttaagtgaggtttgttgagatataatttacatccaataaaataaactcttttcaggacatttgtgttgacaaatgacagggccagctaaccataatgaagataaaccctatttccatcactcaaaacagctcccttgtagtctgtccccccaccgccggcccttgagactgccaatctgccctctgccctgtagctctggaaactcggctctgtggacccacacagtgcctgggcttttgagtctgtgccttggccttagcctggatgaatcccaccagcaccctgctgtgtgcgtccatggtgcctcctttctcccattgctcgaagaccccatcgggtctcttcttgatttcagaccctggccggctcctgtgggaagtttgccccctttgaaattaaagagcacatggtcctggcccctcggcgtcggaccgctttccatccagacctctgcagtcagctggaccagctcctccagcagcagagcggcgagttctccttcttgaaagacctcaaaggccggcagcccctgaggtccggacccacgcacgtttccacccggaatgcagatatttttaacaggtcagagcctgaggaggtcggccttcacccactagtgatgctggaggccagcatcctgaaccctggggtccccggggtgggagctctgggtccttctgttgcttgcttcctagtgccctcgggccctgggcttcggtgctggctcaggcctctctccacctggccttcctgtaagctcctgaagtcttcctctccctgtcttcccagctcctcgtggaggaatcttatttccctgctggtctccagtgaaggataccccccaacacctcgctcttgcaaatctcattccacagaacctcccttgctaaaaatgctctggggctgcacctgggcagctgtcctccctctcaccctgcaggctgcaccctcctccatctgtcccttcagtccatgttcctgacctttctttggggacaggcagtgctgctttttaacaaatgcccatctttctagaattgttaggccagcttcacagggaggttcctgggaggtttgtgagcaggtctgtaaggcagcgtgatcctgagcctggggttttccttctcagtgatgtcgtcatcgtggagcgtgggaagggcgacggtgttcccgagaggaggaagtttggcaggatgaagctcctgcagttctgtgagaaccaccggcctgcctactggggtacctggaataagaagacggcactcatccgcgcgcgagacccctgggcccaggacacggtgagctagccccagagtgcctccgtccccgtacctcctcactgtgcccctttcctccagccccaaagacagttgtgagtcccatgtgtttcttttctcagaagctcctggactatgaggtggacagtgatgaggagtgggaagaagaggagcctggggagtccctgtcccacagtgagggggtaaggatgtgccccagctgtcttcactcacagacggcttgtgtttgagtctctgtcccacagtgaggggctaaggatgcagcccagctgtgttcactcactgacagctggtgtttgacctgctgtgtggtctgaaacctgaacgcacctcaacatccagacttccagcttctctcgaaaaatctcatctggtgacactcgcccacgtggctgctggggatgggatcccgtccgcatctgcaccgtggccccacagccccctcttgcctcctgcgggcctgctgcacaccatttcctcctgactgcccagctgctgtgacctagtgggctttctgccgatgctcaccgtgtctgtcgggaggccatgcaaagcagatgttcacagctttacatttttttgtttctttaagatggagtctcactctatcactcaggctggagtgcagtggcgcgatttcggctcactgcaacctctgcctcccaggctcaagtgatagtcctgccccagcctccctagtagctgggattataggtgcgtgccaccatgcccagccaagatttgtatttttagtagagacagagttttaccatgttggccaggctggtctcaaactcctgacttcagatgatccgcccacctcagcctcccaaagtgctgggattagaggtgtgagccactgcgcctggcctactttgtttttaataaggcacacactctgcttttctatctgatgaactcttttttttttctccttttgaggatgatgatgacgacatgggagaggatgaagatgaggacgatggtttctttgtgccccatgggtacctgtctgaggacgaaggtgtgacagaggtgagggagtgaagggggaggtcaccggctcagcaaaagttcatttctggactggtgctcagtggcctgacctgggagggtgacgggggtcccagcccaaccatacgagatttggactgcattccaagcacgcaagctcactcgtgggaacagctgggcctgaacttggtattacctgggagggtggcagacgtaggaggagcttgcaagcgaggggagccataggagcagacaccctggtgagggagcgtggccatggtctgtgggttagaaggctggaaaccacccgagctgacatacagtcagcatgcagcaagacatgtgcattgtaagtgttgagtttgatgacgtaacaatcaagtgaatgtgggcaaccaccgcccgaaataaaacagaacttccctatctctccagaagattgcccacgtctctgcaggcgaacctgcctgccacccctttccagattccataaggttgtggaactgtctttttttttttttttcttgagacggattctcattctgttacccaggctggagtgcaatggcccggtgttggctcactgcaacctctgcctcccgggttcaagcaattctcctgcctcggcctcccaagtagctgggactacaggcgtgtgccaccacacctggctaatttttgtatttttagtagagacgggagttcattatgttggccaggctggtcttgaactcctgacctccagtgatccacccgcctcggcctcccagagtgctgggattacaggcatgagccaccgagcccggcaggaacttgctttcaagcaagttgtttttggtcctgttttgttttgaaggcctgtcgtttgggaagtggggatttggtgggactgtctcatggttggactggaggcctaggcattccttgtgcatatctgaccaccgaggcctgaactgtcagtcagagagtggtctcaggccctgcatgtgtctgccagatgcctgggccatgtgggtagacacccaaccctgttaaacggctccacgatcacacattcaccagaaaattcagaggggtgttaaaagaggcctcatgggtgagttcagaaatatctgtgacgctcccaaaggagaccaggtgtgaattattccatctggaagaggggcagccagcgcatggtgtgctctgccctggccctgacactgtgggaagttttgtgcccctgtcctttcctcttgctccccagctggctggggactggttcctcaaaagagtgcccgggcataggggagcaagaaccccaaataaacttctgctttctaaaccacaaggagtgtgccgaccctgagaaccataaggtccgccagaaactgaaggccaaggagtgggacgagttcctggctaaggggaagcgctttcgcgtcctgcaacctgtgaagatcggctgcgtgtgggcggctgacagagactgcgcaggcgatgacctgaaggtactgcagcagttcgcagcctgcttcctggagaccctgccggcccaggaggagcagacgcccaaggcctccaagcgggagaggagagacgagcagagtgagtgtgggcggggccaggccacccacctgttcctgggcccagctaattccagggctgagggcaagagtcacaggctagtgggtccgtgatgcaaatgttctttccacaaataacagaggccagcccttttcctgtacatgtccgtacgttcaatgatgtccctagcagcaggacgaggcaggtcccttaattggcttgttttatcaaccaggacacaggcacagagagtgctggagtgggggctgtgctttctcaaaagccagggaggggccgggcacagtgcctcatgcctgtgatgccagcactttgggaggccaaggtgggaggatcgcttgagcctagtgcttcgacaccagcctgggcaacatggcaaaaccccatctctgcagaaaatgcaaaattacctgggtgtggtatcacgcacctgtgatcccagctactcaagaggctgaggtgggaggattgcttgagcctaggagtttcagaccacagtgagccatgatcctgccactgcactccagcctgggtgacagagcaagaccctgtctaaaaaaaaaaaaaaactcaaaaaactggggagggaccatggcacacaaggagagcagggcagtcatttgggtaggaacagcaggcatttgaagtcagccctggcaacacacgtgcccggccaaggctcacttctgggcaggtgcgtaggtgctaccctgtcttacacccgccctcatgaggccacctatccccgaagctggccatgccccaagcctcggtggcaatgagcttgtgtatgtgttttgttttttggcctgtggtgatgggtggctccccaagcctcatgcccacccatgttccctcctgccagtcctggcccagctgctgccgctcctgcacggcaatgtgaacgggagcaaggtcatcatccgggagttccaggagcactgccgccggggactgctcagcaaccacaccggcagcccgcggagcccctccaccacctacctgcacacccccacccccagcgaggatgccgccatcccctctaagtcccggctcaagcggctcatttccgagaactcagtgtatgagaagcggcctgacttcaggatgtgctggtacgtgcacccgcaggtgctacagagcttccagcaggagcacctgcccgtgccgtgccagtggagctatgtgacatcggtgccctcggcccccaaagaggacagtggcagcgtcccctccacggggcccagccagggcactcccatctcgctgaagaggaagtcagcgggcagcatgtgcatcacccaattcatgaagaagcgcaggcacgacggccaggtgaggtggggtgggcaggtgggggcctctgcagggcttttctttttttgtttgttttttgttgttttgtttttttttcgagatggagtcctgctctgtcacccaggctggagtgcagtggcgcaatctcagctcactgcaacctcctccctcctgggttcaagtgattctcctgcctt[221 bp omitted]tagggtcacagcaaaatcgattggaaggtacagaaagttcccatacacctccttccccaaagccaagccaagccacccaacatcacctcccagaatggtgcattggttacaatcagtgcacctcaggccaggcactgtggctcacgcctgtagtctcagcactttgggaggctgaggcgggaggatcacttgagcccgggagttggagaccagcctgggcaacatggcaaaaccccatctctaagaaaaaatttttagattagccaagcggtggcatgcacctgtagtctcagctactcaggaggctaaggcgggaggattactggagcctaggagattgaggctgcagtgagctatgatcatgccactgcactgcaacctgggcgacagagcaagaccctgtctctaaaaataaatacataaaacgcaccttcgttgatttatcaccaccactagggtttgttgctggtgttgagggttctgtgatttgaatgaatgttggatgctgtgcgtctacctttattgttttaaacaaagaggcttctccccactgaaaggcccctgtgctctgcccgtccaatcccttggaaatcaccaacctctctatctccgtggatcagccttttccagattgccctgtagctggaatcgcatcgtgtgtggctcctttgacttggcagtatgcgttgacagttcctccgtgtctgtttgtggcttgatagctcttttttttttcacactgaataatattccatgtggtagcatttttatttttgttcaacggttcttgaattttgcattcaagcacagttattaagcacttactgtgctccaggcactctgatcggtctctcagacacaggtatatgcagaacaccgcccggtgtaaggcacagacaggagcctgtaaggggaatgaatggctgtgtgattccagccttatgggtgcctcggaggcacaagcgcatggagccctggggtgtgtgatgggggcactgtctggtcttaagaaactctcatgcccagagagccactggcccctggcacccacccctggccatagatcggctttgttaacgttcattgcatactttttgtccttaccacacagtgttcggaagtgagtttctcttttttcttttttttcctttttttttttttttttttttttgagacagtctcgcgctgttgcccgggctggagtgcagtggtgtgatctgggctcactgcaagctccgcctcccgggttcacaccattcttctggctcagcctcccgagtagctgggactacaggtgcccgccaccacgcccggctaattttttgtatttttagtagagacggggttttaccgtggtctcaatctcctgacctcgtgatccgcccgccttagccttccaaagtgctgtgattacaggcatgagccaccacgcctgtcctggcctttttttgagtcaggggtcttactctgttgcctagtctgtagtgcagtggcgtgatcaccactcactgcagccttgacctccccaggctcaggcgatcctcccaccttagcctcctcagtagctgagagggactacaggtgcatgccaccacacccagctaattttctgtagaaacagggtttcaccatgttgcccaggctggtccccaactcctgggcttaagcaatccccctgcctttgcctcccaaagtactgggattataggtatgagccaccgtgcctggctccctgagtttgatttctaatatctacacttaacgcagacctatctgtccctgtgaaccttgggctttccttcaaggccacgatctgatggagttacaggttttcagagacttgggacaaggagcaagacagtggataacccccggccccagcttgcatcctcttctctgatgttaaaggtggtcgttggctgggcacagtggctcacgcctataatcccatcactttgggaggccaaggcgggcagatcacctgaagtcaggagttcgagaccatcctggccaacatggtgaaaccctgtctctactaaaaatacaaaaattagctgggcatggtggcaggtgcctgtaatctcagctactcgggaggttgaggcaggagaatcgcttgaacccaggaggtggaggttgcagtgagccgagaccacaccattgtactcgagcctgggcaacacagcaagattctagtcccccaaaaaaaaaagaaaagaaaaggtggtcgttaggggcagggaggcgagagaaatggctcctgagatgatgctcagccatctccctgctgccagcacacagccatgggccttaatatgctgtgaatctccctcagctgtcacagcaggaggggccatcataacatcccaaagggtccagggctacgactgaaactgttcctggcactccctagagcctctgtccctgtacagtgtgtcatgtgcatagttcccctggctctgtggaggcggcttggcgccgtgggaagctcagtgcattggagctggggccacaggaggcccccacacagagctttgctggatgcattctttgttcaagccctgtgtgagcagtgcctttccctggtcacctgagcagccttagagggaaccggagctccccagcctgaaaatgatcggggcgggaaggtactatctggttgtgtcactatgcaagcagttttccagggcctttgctgatcagccctcccctgggaacccctgtgtccctcagatgttcctttggggtctcctcatgctccacacagtagtccaggccctggacggcctccttccccacccctctccactgatttgatgcagcagctgcctctcccagctggggtgcagtgccccgcccctggtcctcccaaacactgctcttgctccctgtcaacatgtggaacccatgtttccccacccggaaaatagcgccctgagccccatgtgcccagcaccacatcagagttactgtgcttcgggggcagtgagtgcctgtttatcatccctaaccacaaggaaagaagggtgcacccagtttaactagagtgggtcagagaggttgggtgggccttggagttagcaaaacacagcatctcacctgctaatggatggcagtggtggccacatgcgcgtgattggtggcctctgctgcgtggcacaggtgagggcctcctggggctcagcagtgcagcggacgcacgaaggtcacacgtgaaggaatggagacccaggcccagcttgatgcttaacccccacccctgaacctcctgcagtttgggacataaacgtccctggggagcagggtctggtcctgtgttttttttcagagcttgtgtggggaggggcacacaggtgggacccaaaggtggggctgtggaagcacatgagcccggatgggacatgtgccctggcatcctctgtttttttttgacagggtctcactctgttacctaggccggagtgcaatggtgcagtcacagctcaccgcagcctccactcctgggcgcaagtgatcctcctgcctcagcttcctaaggagctgggagtatagaggcacgtgccaccatgcccaactaattttcaaatattctgtagagacagggtctatgttgcccaggctggtctccaactcctgagctctagcgatcctctctccagcctcctggcatttaataaagctgctgactgatgcttctgcacccaaggggagggataagccattcatctgcaagtggtgtacatccatattttttactcggttacactttttttc[136 bp omitted]ctgcctcagcctcccaagtaggtgggactacaggcgcccaccaccacgcccagctaattttttgtatttttttagtagagacggggtttcactgtgttagccaggatggtcccgatctcctgaccttgtgatctgcccgcctcggcctcccaaagtgctaggattacaggcgtgagacaccacgcccggcatcttttcttgttgttaaattagaaacagggtcttgccctgttgccctttattattttaggttcaggggtacatgtgcaggttggcaaactcatgtcacgggggtttggtgtatagatgatttattgggtactaaggtattttttctgaatttctccctcccaccgtcacataggctccagtgtctgttgttcccctctttgtgtccacatgttcttataagtgagagcatgtgatatttggttttctgtgcctgcgttagtttgctgaggataatggttcccagcttcatccatgttcatgcaagaagaggtttttttgttttgttttgttttgttttgtagatattgggtcctgctgtgttgcccaggctggtctttgaacttgtgggctcaagcaatccacctgcctcggcctcccaaagtactgggattacagacctgagccagggagtctttaaatctttttacttagagctcaaaagagatattcttaaggcattctgacctagtggggtgaagtgccatgtatctgtgaagccctaggacacctcaactcttcgggcctccgttttatttaaaaattttaaaatacaaggaaggatgtgtttgcccttgccaacaaaacattatg[132 bp omitted]aaacccgtctctactaaaaatacaaaaaattagccaggcgtggtggcggctgcctgtagtcccagctactcgggaggctgaggcaggagaatggcatgaacctgggaggcggagcttgcggtgagccgagatcgcgccactgcactccagcctgggcaacagagcgggattctgtctcaaaaaaaaagcatagatggctgggtgcagtggctcacgcttgtaatcacaaaactttaggagaccgaggcaggcggatcacttgagaggccaggagttcaagaccagcctggccgacatggtgaaaccccatctctaaaaatgcaaaaattagctgagcatggtggtgcacgcctgtaatcccagctactcaggaagccgaggcaggagaatcacttgaactcaggaggtggaggttgcagttgagccgagattgtgccactgcactccagcctgggcaacagagcaagtctgcgtctcagaaaaaaaaaaaaaagacaaaaaggcacaaatgttagtgacaccatcttcatcccatgtagtcgttaaacgttttcctgactcctgttttccgtagtctgcgctcctccgtgtctgtgtttagcacttgcagtgctgctggcgagatgacagctgtccccgtgaagcaagctgccggcagctcagcacagtgggactcggtgttatgtgttaaatcctgtcttcagcctagagggtgaagagtggtgattgctctgaaaaattttggatccaagaaaagcctaatgtgtcaacgcgtctcctgtgtggagggagggcccagtgacttgaggtggctctgaagaaattggcatgttcttttgtttaacgtccccagacacctccagatcagaatgtccctcctcagcagcgtctacaggggactcttagactcttctttgcttaactattctttcaaaaaggtagttgaaaatggccgtaggccaggctcagtggctcatgcctgtaatcccagcactttgggaggctgaggcaggaggatcacttgagaccaggagttgaagggtgcagttacctgtgattgcaccactgcaccacagcctgggtgacagagcaagatgtttctcctgtgtcctcacagggtcaacccatgctgcctggggagagggacagcctgggctcccagccactgaagagaggatccaggaggggagcccctacccaggaattgatgaggctacggtaggaacccagtctgcctggccaggcactgtgctcttacatgacagcccatgaaaccagtctatggcctgaccgttgtgttgctgtgcggtcacttttctaggtttttgtagaggaagaattcctggaattttttgaggactatcctccctactgaaataagtgtggctgtctgtcctgggatgggcttgtgttcatgcacagagagggtaagcactgacgtggaggctcatggtggcctctacgcatcctgtctttctcctttggtgaaagcaaatggaaacagctcaggaatcttactagggtcaggtgcggtggctcacaccttgtcatcccagcactttaggaggccgaggtggaaggatggcttgagcccaggttgagaccagcctgggcaacatagtgacacccccttgtctctacttaaaaaaaaaaaaattagctgggcgtgatggcgggtgcctgtagtcccatcttctcaggaggctgaggcaggagaatggtgtgaacccaggaagtggaatttgcagtgagtcgaggtctaaaaaaataataataataattcacaagtcacagtcatcacttcacatcagggacgtgttctgagaggtgtcctcaggcaatttcatggttgggtggggctaggttgctcttacacatcctagatggacagcctgccacacgcctgggccgtgtggtacatagcccagggctcctgagctgtggacctgtgcagcaggtgactgactgctccatcctgcaggcacttgtaacccagtggtatatgtgtctttaacatagaaaaggcacagcagaggccaggtgcggtggctcatgcctgtaatcccagcactttgggaggctgacgtgggcgaatcctgaggtcaggagttcgagaccagcctggccaacatggcgaaacccccgtctgtactaaaaatacaaaagattagctgggcgtagtggcgggcacct[137 bp omitted]tggtgaaaccccatctctactaaaaatacaaaaattagccgggtgtggtggcaggtggctgtaatcccagctactcaggaggccgaggcaggagaatcacttgaacctgggagtcagaagttgcagtgagccaagatcgcaccactgcactccagcctggatatatggcaagactctgtctcaagatttatatatattaaataaaaatacagttgtctgtaatcccaggactttgggaggc[134 bp omitted]gaagaacgagaatcgcttgaacccgggtggcggaggttgcagtgagctgagattgtgccactgcactccagcctcagtgacagagtgaaactcccgtctcaaaaataaaaaataaaggccaggcatggtggctcacacctgtaatcccagcactttgggaggctgaggcgggcggatcacgaggtcaggagatcaagaccatccggataacacgatgaaaccccgtctctactaaaaatacaaactgggcgtggtgtcaggcgcctgtagtcccagctactcaggaggctgaggcaggagaatggcgtgaatccgggaggcggagcttgcagtgagtcgagatcgcgccactgcactccagcctgggcaacagagcgagactccgtctcaaaaaaaaataaaaataaataaatacagttgtaatctgatggggccactatcaggtatgcggcctgtcactgactggaaattattctgcagttggcaatgatggctgtttttggagatctgaatccagttcatttgagggaacccccaaggttctctggttgtggcctcttgaataaacctctcacatttggacagtttgttaccaaattgggttctggatgttggtttccttccgtgttgggggtgggaggaaggtgtcacacctgtggagttccccccgctaccgcactggcaccagggtggctgctgcctgcagtgctgatggccgtgtaccctgtctgtccagattggtgctgaagacatggacggcttccaggcagacacggaggaggaggaagaggaggagggcgactgtatgatcgtggatgtcccggatgctgcgggtgagaagggctgtagatagcagaacgcactggtgaggtgggcgctggaggtaaacctcaacagagaagggatggggctgcctaagactagctccactgtgagcagccaggagggcttgcagctggaagtggctcctgccctgccacatcctcgggcgggctgggccgtgggtgctgaccatgccaggcatcgttctggccgcagagccacaagggcctatgctgggagtctcaggtggttgtgacgttagatgggggtcagggaaggctgcactgaggcagcaagggagggccaggtggatttctggagcactcgccaaagaggaagtacagaggccctgcagcaggctgcgtgggaggagtgtgcccgggtggtggggggcaggcagggtcaacctgagagcaggtgagcaggtcacctctagaagaggcacaacgccccagcctctgcctgtccccactgtcaggtggagggtcccgccctggggttgttgcaggccccatgaggcagcagggtggggtcttcccccagggagcccagagggcccagccagctcaagaccctccctctcttgccctgcagaggtccaagccccgtgtggagccgcttccggagctgggggtggtgtgggggtggacaccggcaaggccaccctgaccgcgagcccactgggtgcatcctgagagcaggggtgacgtatgtagaatgcttagggtgtcctccccacagagcagatacttgaaccgactcaattcctgtgtaaagagcactttgtcctgcttcacggacctccccaaagtgtgcagagttctatataggatgctggattagttcctttgatatttgtaaaaattcccccaagagccgcatatgaatctgccctttaataaagcattattgagattgctggcctattggggaagcctgcgggcacaggagcaggcgtggaatccaatacttgtaaatgaattgaagcgtcaggaccacccgcctggccacgtgcgcgggcccctggacctaacgaggcagtgtataaacttattctctagccctgagctgctctgtctgtcttttccgaaaacattgtgtttctctgagagtgcaccttgcccatggcccggccccatgtggtgcctggtgtctggggccagccttgtgccctgcaacagcaccgtcccatctgtttgtcactaagtcaccctcataccaggctgacctgggtcaaggtgcgggtttttccgcacgtgcttctgtccggcgatccctcctgccctgggttggggggttaggagagggtgttcccagagacctgctagggtcacctccctgaacccggagctgctgggagccgagtttggcttcgagtctgaggctttgtgagagcccaccccaggtcaggtgcatcttttgcgagtgctggagctagaaggtgacctcctccccgccccaggttgagtgggctttatccacactgtccgagggaggacaggcgacagccgctgtggtactgagcagctcagagcacacgcagccacggggagggtcacgctcgccagtcctgctcttcccagccacaccccacctgaagtcctaagcttcccttcagggaaccctatgtgggaaaagtgtcagctacctccatccacccagtcagggacggcagggcgcccgggccaggccttcctgctgggaagcaggattcagctgtgcctgaagcagaggctgcccctgtgccacacctttgatgagctttacaggggctcccgacaacccggaatcaggtcctggggcctgcaggacgcaggactggagtgacagcctccattctcaacaggccgggtgcccacaccagctggggcagtgccgggggcgagggagggaccaatgcaaggtcaggggcacgagcataggccccgggcacctcccccaggtgcagacctgcatccccaagtcagcagtggggccggggcacacatgccttccacactgcagggcagagtccctgtgtctcctggggctgctgtaccacaaacctggtggcttaaagcaagtcaccatctcacagcttgggggtcagagtgcacacatgccccgccaggctaacatcaagctgtgggcaggaccaggccctcctggagagtttcccagtgctcggaggcgctgcatccctcagctcggggtcccttcctccaccttcacagccatgcgcagcctcttccagtctctctctgattcaccctcctgccacctcttgtgaggacactgggtcccggaccacccaggatcatctcccagctcaagacctttcatcatacccaagcccctcttgccaggtgaagttgcgcatctgcaggttccaggaataggatgtggccgtctcaggacaccctgtccctctggccacagggaagccaggcctgtgacagcactcgcctcccctgcagggactgggcctttgtgggcacagcacagcctcccctagcgcacgggacttcctccccaggtgggtggctcatcgggcacttgtggccaggtgctggcctgagaacaggtatccacatggtcccaccttgacagggagccacacccagcccccaagccatccgctcttcagcaggtgggcctgccctgtgtcccacggtttcaacggagaaccaagaaactatattcaaacaacctgtttatttgggcttatgatttactaactgcaggtctatgtgcaggaaggccagcatcccctcctgccgttgtcacccacatccacagagcagccctagtgccaggtgcagccactgccacccacggcacacgggaacaggacccatgctgcaggcctgctctcctgcccagggagatgccacgtgtgtctgtccggcagcttcatgacacagttaccaagcagctagggagggcttagatttgttggtgtccccaggcctctccctcgggggcttgggcgcatccccacagcccccaagggatgggggctctgccacggggcccaattccacagctccacggctggcgcccctcccgtgcccatggggcagagccaagtatttccagaggtggcttggaggccctggggtggcggggagaggaacagggagagcatgagacagacccacagggctgaggccaaccctgcttttatttcacaagagcttctcgatggctgacaggagctcgggtttcaggatggagtccggctcggcccccgcggccttgatgtcctccagcacagccatgtcccacgagaaggtcaggagggcagagggcacctgcggtaggggtaggccgtcactctgagaccgagagtcggcccttgccgcggcagggaactcagcgggcaacctgggcgcggggatgccccggcctggaagccatctcagctggtggaggctgtggctcgcacccaggcctcctgccctctccctccgggactccaggacctaagcctaaacctactgcactagctaacgcacgtcaccgctcccatttgatggggaaactgaggcgtggagtagttatgaacttgctcgaggccctgctgccagtaagtgggaaagcaggattcaaacccagggacctgcccaggccccctgctctgagaacaaggaggctccctcctgggggtgtctgtgccggtcccaggagaacctgcagaggcatcgggtcagcggtgctcctgcgggccgacactcaccagcccgcactcgttcaaggccaggttctcgtcctcggacagcttctgccctcccgaggccagcagctcaaaaggcagccagtcgctctgcagggcctcccggacgaacccgtacaccgcccccagccgctcccgagcgtagaaagtgcctggggagtgggggagtcagagcgggtggggcccagggccccctaccaacccgagccgccctccacgggcatcgttggtgcccaccctgcaggaggcagccatcggggaggcgcacgcgcagcagcgtgtagttgtacttgcgcagcccccgctgctcctccttctcccgcatggccttggtccgcagcacgctcagccgctccaccgcctcggacctgcacacgcgggccaggtcacgagggctggccggggttcttccaccccgccccgccccactctgctccgcggacgtcaggcccacctgagcctctgctcccgcttgatctcctctgctgtgaggttgaagaagtccccaggcagttcgaactgcgaggccaggggcgagggctggaagacgcggcgctgcctgtccagcttggcgcgcacgggctccgcagccagcagctgttccttgtgcctctccaggctctggggctgggccaaggtggtctcgctcagcacgtagaactcctcggggtcctctacagcgtggcaggacatgggtgtcactgtgcaatggagagacccccaagccgggccctcctgccccgaggcccctcgtccccattccctactcagccaggccctgtccacttaccctgatcctgggcgggaagcaacaccttctggaacccaatggcctcaaaaaactcgtgggtcccttccaggcagttaatgcgctcctgggggtggagatgggcgtcactgggggcccctggcttcctccatggcctggccacaccccacccagtccaggggcccggctctcgctattgggagcagctgtcgacccctggatggggcccagccctgggggtgcctcagtgctggatgcaaacctgcttttctacggtgggggctgtggagtctccaacagctctgcacagaggaaagagtcacaaccaggcacgaagagtgaggctgaggagccagacactgctggggcctgatgcgaggctaacaccgcccaggaccccagtccctgccctttcccccagaagaaccagacatctggtttgcatgagaaacctccccagagtcgacatgttcccaaacaagcccagctgaagaggaggaaaaggatgcaggtgaggagaggcagaatttgttgatttggggtgaccggtgcataaaagtcttgctctccatcttgtcctgctaccttctactggccgaacccttcactgcttgtggctcaactctcgctagctcctccagggagcccaccgcctggtgtgggccaccaccggctcctgcaggccagctgcccccacccccagcctgggccccgggggccagaaggcacgcccacctgaaacaccttgttctgcagcttgatcttccggtacttctcctcctcggggtgcaggtggatgttgtccaggtacctggggtaggtggagaaggtgagtggggcacagcccaggctgcccacccggcccctctgtgcctcctgctccaggtaacagcagctcagccacacttggcctctagtcagagggaagaagcggcccagtgacgcgagggcagcagaccatctccgggtggaaggcacacctcggacaccccatggagcccacccctggtgccagcaggagccccacggaacccctcaccgtcccaccagccctggaagggcacaattaaccacagcggtggggaagccacagtgccggaagagtggagagccagagctgaagggccgcagtgccagcagggggctcctgcggggtgctccctcggcgttggcgggcagcgtggacctccaggcctgcccccgatcctgagacccggggagtggggtgggaccctgcctcctccacatgttccccaaggaagccagggtgggaaacccctgattccttcaacaccttcattttgcacacgggtaaactgaggcccaaggaggcccagccctttgcctgaggcctctgggtggagctgcctcactctcggcctatgctccttcccaacccacctcagcaggtaatgagggggccagagggggtgacagccccagtgggaggggtgctgggatgagctggaggggccaggcagggcaaaggggccacacgctcacttggcaatggtgtccacacccagcttcacccggtcctggtctttgttgaacgtgtagatcttcatgatggaggcggccactgggtcggtggagaagtgctgggaggagggaagcagggaaagccactcactgagagcccgggccgcacggccctccgctgcccaggtaacaggggcaggaaaaggaaggcagaacagcggcttggagcggccccagctgtgcgctcatcacagaaaggaaaagagagaccctccaagaccgcagccctgcccacgccccagggcagaggcgacgcagccaagacccagcagaactcaagtctccccttccgccttctcaaggctagatccatgggacttggaagccagtgtgacgcgacagaactgtgcctcacactctggctttagaactcgacctcagtgctgagatccatcaaggccaccgccacttacagaacctcccgccaccatggacgccccatccctcctgctctcgcagccccatgatggacgttctggaaccactcccgggcctcatgtttacaaagagaccgagaggcccatcgtccagggtcacagggatggcaggtggcagagaggacacaaatgagtctgcaaccctcaatgtctgaaactcaatagctggaagacggatacccccagcccctgcccctccccgaggtcccacctatccacctatgttaccgggggaggggagaagtcatagctggaactctgggggtttcccagaaccagccctgctgactgcgaacagcgtcccagcatggagaggctgagaacagtacgtaccctaagacctggaaaagattggggcacaaatccacgctcggcacagccatcacacacggccacacccagagagccacccatggcctgggaagcagggctgccacccgcacctccctgggctgcccagacgagggcgggtgaacagaagggcagcccagggccatgtgtcaggattcgggccacctgcccaggcagcccagagctccacccaccaccccccaccctcaactgcacagcagggtccctcagcagccccctgcgtcacacggaccaatgacctacacactgagccggggctcatgccaactgaaaattgggacccggcccagtctgccggtttagttgctgagatgatgtggggagcgggacagagcacgtggatgcagagaggcagagctgccagatgggcatgtccccaagacaacagcttccttgggatcagagcgcccgggacagcacaccagccaagggaagcgtgtcagctccaaaagcgggcctcgggcgttttgggcgactggctgccaggcttaggtcaggagctgggtacatgcacagacaagggacgaaggaacagcagccaggaaggggtccaaatccatacaggaatgtactttgtgagaaaggtgggatttcacagctgtaagcaaaagacaggtgctctcgacaggtggggctgagaagaaagctgagccaagatctaaaaaaaaaattacatcagctccatcccaccatgttacataataacatgctccagctggatcaaagcttcaaccatggaaacaagcaagcagtcaaggagaagccagaagaaaagctctggaggccgggcacggtggctcatgcctggaatcccagcactttgggaggccgaggcggtcggatcacgagattaggagagcgagaccatcccggccaacatggtgaaacctcatctctaaaatacaaaagttagcccgggtgtggtggcgtgcacctgtagtcccagctacttgggaggctgaggcaggtgaattgcttgaacccgggaagcaga[131 bp omitted]atttctaagaatgaccccaaacccaaaagccatgaactaaaactgacacatttaattatacagagatcaaaaaatcctacacagcaaagtgaccataagcagagccaacatagaagcaactagagggaaacatgtgcaactcatatcataggcaa[210 bp omitted]ggctgagg[170 bp omitted]tgtagaaaggacgcattctcatatgaaacatggccaatccaaaataaggaaagtgcaaattaactctatcctgagatgttattttcacctaccaacaggcgtaaagatcaaagtttggtgatttacagtatggtgagaggatggggacacgggtgcttttgcacacactgctggagtgggtgtgagtctggagagtctatggaactattactattttgttttgttttgtttttaagatgaagtttcgctcttgtcacccagtgtccacgctggagctcaatggcgtgatctgggctcactgcaacctccacctcccaggttcaagcgattctcctgcctcagtctcctgagtagctgggattacaggcgcctgtcaccacgcctggctaatttttgtatatttagtagatagggggtttcactatgttgaccaggctggtcttggaacttctgacctcaggtgatccacctgcctcagcctcccaaagcactggaattacaggcaagagccaccgcgcccagccacttactattttctgagaaagggtctcacttgtcacccaggctggtgtgcagtggcatgattacagctcactgcagcctctacctcccaggctgaagcaatcctcccacctcagccttctgagtagcagggactgcaggtgcacgccaccatgcccagctatttttttttgtttttggcagagacagggttttgccatgttgcccaggctaaagccgaagtttctgagaacctattgatggtgttaagtgaggacttgctgtattggaaaaaaatgctgtggacgtttttattttttgagatggagttttgctcttgttgcccaggttggagtgcaatggcgctatctcggctcaccacaacctctgcctcctggattcaagcaattctcttgcctcagcctcccgagtagctgggattacaggcatgtgccaccatgcctggctaattttgtaggaagttctttctgtattgaagcaaataatacttaaccttttatgaaaaacaaccaggccacgcgtggtggctcacgtctgtaatcctagcactttgggaggctgaggcgggttgatcacttgaggcaaaagttcgagaccagcctggccaacatggtgaaaccccatctctactaaaaatacaaaaattagccaggcatggtggcaggtgcctgtaatcccagctacttgagaggctgaggcacgagaatcgtttgaatccaggaggcggaggttgtagtgagccgagaatgcgccactgcactccagcctgggtgtcagagtgagactccatctcaaaaaaaaaaaaaaagacacctagttgggagagaggagatacagatgcatacacaatggtgtgcctggatttggggtatcagaggaggggcttcactactagcagtggcctctggggactctgggagggatctgtaccacctgggcttccgatggagggtggctcaggcacaggaagctacaggttggggcaggagcacacagggtgccactcaccaagagaatggcctccttgatgcaggcgtcccgctggtccttcctcagggtggccccagtgagcggacaggtgaagtacacgccaggcacagccaggtgggcagagccttcctctctgggctcagatacctggggcggtgaaagcgtccaagtctggaccgtggacagaggccaccccgaccctcgccgagcaccacagtcctgagtgtggcccgtagaaccagacatctccagcccccatgctgtcccttccacctggtggccgtgggagacaccctggccaagtgaccggatccccgagtcttttccctggtatgtcaaatgtccctgtggggcctgctcagaactaaacgaggtaaggaacggaaagtacggagcagcttctgacacgcaggaaacacccagcagatggcagctgggttcctgctggtcctgtccccaagctgttgaggaaggagctctgtgtgggtgtctgcgggcacagtgcgctggacaaggcatgacttctgggcctccatttctaggccatctctaaggtccctgcgtgctaaaattcactgaatcctcgagggtcaagctgcttagaactcctttcagcggagctctgaaggcccacctcctagaggaaggcctccctgattccacccgtctccacagagcctcttgacctccaaggcaggcaggactgggcagtgctaggggacaggctctgaaaccacagactggctctggtcctgcctttgctggtcctggggtgtaggagagaggacagctggtttcacctctctcaaccccggttctctttttgaatagtggaaactgtaactgcatctgcccttaaggggttaaggggagggagcgatgggctcgtgtacctgaggcccacttctccaggcctgagccggcatcctcagctgccgagccccgaaggtcccagacaacaccgtgttccaccacaacctgtgtccaccttgcaaggcaaggttttccaacagcccttgagccccaagggcagaggccacatctcccccgtgacacagtcaagctgtccccaccccttggcatgggacagtgccaccagtggctgttcttaccacgttggtccctggggcctcggggctcccgctgacggtggcttcggcttgaagttcctttctcactggaaggcagcccaagaaagagaggcagagacgggatagtgagcacgccgctgtcctggcccaagccccctcattcccggggtgggcctgggggccacgcacaccgccccagcctgcttctgctggaggtcaggctggaggtcccctgcaggacttgctgtgcagccacccctcagcctgagcaagcaccccactgcctgggcagcccgtttctgctccaagtctctgctcccaccccctccccaggaagctgcccttcccccagcacctgcccttgatgagccgctcccaagggtgaccctcacacccccacggttgctcatgtgacttctgcatccagggccaggcaccagggccgagaacctcaaacagccccaacctgggcccgaggagggccatatctcaccctggtttcggatggtgtcctgcgatgtggggccccaggcccgggactgcttctgctccagccgggctagggcggcagcggctgccatctgtgcctcattggtgggtccctggcggggcggcctgggggctggctggttgggcttctctttgtgggccttttccctgggaacagaccgagggagagtgagtgtatcctcccgaggtggccggcaaagctgacgtgcagtcacacagaggagcttctgcccctccccagcaccatcagccagacgtgtccctgcctatgtgggccaggacacctggttcccaggggccacctgcagccaccagatggttctactgcaggcggaagagcccctggaggaaggagatgctggttccactcagctctgcaccatcgggcaagtcctgcccccactggccctcagcgtcctcatctgtaaaatggggtgacagcacccctcctgaggtgaaggcaccttgacatcctcagtgctttttttctttttgagacagggtcttgctctctcaccaaggctggagtatagtggcacgatcatggcttactgcaatcctgagctcccaggctcaaggaatcctcccgcctcagcctcccaagtcgctgggacttagaggcaagcatcatcatgcctggctaatttttctatcgagacagggtctcgctatgtagctcaggctggtctcgaacttttgcctcaaatgatcctcccaccgtggcctcccaaactgctgggattataggcatgagccacagcacccagcccgcatcctcaggaattgaggagactcaaggggtgtcacatcctccctccctccctgccataagactctccaccctcaggtcacagcttcgtttgctgagcacctactgtgtgccaggaccctgctgggagctggtcggctcgcttggtttactcctcctaacaagctgccagggaggcctcaccatcccattcctaaacccaagagggacaggaagtccgggcgatgtgccccatgccacgccaccctcgtggcgggaccctggggagagcggacagcagaaccagcctcgccctggccactccatgccaggcctagggctgtgcaagtacgaagagctcatggactcgtggctccaccctgttgagccctacaccaaggagagttccgtaacccacgtggcacagtgacctggcagagaagcctcgcagagaagccctttctcccaacctgctcggacgcgtctgtctcacccgtctcctctcaggcccctcccatgaacttacgggctgtgtcaatttctgtgccgtaggtctattaaaaccttctgggaggccaggctctcagttcaagccctatactcctctggctctgcttacatacccgggcagccctccctcctcgtcccacccctgcctatctagtcctcccacagctgagcatcttgggtggaagaggagatgactcatgaagacccaccccggcctcatccgatatctgggtctttccaacaaaatgccatttcccagggcacctcaccccaaccagccatggaccctgcccccctgggcagccacagggacccttctggaacctcagccagggagcgtcagcatcactccactgcacaacgccctcccactgcaaaatcctaaagcttcccttggccagagagcccttcccagcctggcccactgccctcccgtggcctgtctcccctgggctccccgcagttcttcccacaccccagctgctccccactgcaggcccctgcactgtctgcaccttctgcccagaatgttctccgggggagtgggaggaggatgggggtctggaaagggctagagctgccgcagggagagaaggaggggcagatttccccacagctgagtctcactgtgtcctgggagaggccttcccaaaccacctgacggcccctgctcaccctccttggaggccctgggcactcatccaagcactcatcgcctgagcgctcatccaaggtctgttggtttatttgtccatcggctccctctagaaggtgagccctgggacagcagaggccttctcctgtccaccactgcagcctaaaacaggacttggtgcccacccaccccacacaccctggatatgcagtctcgctccacaagggacctccgcaccgcttcctttcccaaccttcccctccaaccttcccctctccgcccaggctctgggctgatccagccatcaccccgataccctgcatccttcctatcatgcccagtcccagtggccccagcaccccccacccactattggttgaatcaatgaagggctcccccgatttgcccccttctctccctgacccctctccctccctcactcagcctttgctctcctgctctcccccaggaaccctgacgtcctcactatgcccctacctccatcaccaccccactgccccgtgattcctgacccccacttcctgccacctccctgcctctcccagcccccactccctcacaatcccttccactattgcttacagacccgtgtcctggctgcctggctgacttcctcagtccctctccatcagtccccaccaccctctggccagccagctccctgcagcggccccagctctccagtttcccttttctcaacccaacagccctcagccttgcaccttccctagctccacttcttccccggccctcccagctggctcagccctgctcaggcccttctctccaagtcctccctagacaatccggaagcctgcccggcatctatctcctttcccctcctctcccacttccataatccacttggcacagtgacgtggcagagaagcctcgcagagaagctctttctcccagcctgctaagacgcgtctgtctcacccgtcttctcctctcaggcccctcccgggtaagagtccatctgtcagaatccctcacctccactctcctcacacaccttcctcagcccctccctctcaattcgccaggacatcccaggtcactgacgacgctgcccaccccggcctccctggccttccagactctttctagtctcccatcagcctcccacgtgctccagataccaaatccagaacccctcttcccatggatacctcaaaacaactcttcaccaccccaccccacagctgtgcgtcctcctccaagctcagctcccatccatggtcacctagattgccccaaatcatcccggcctcttcggccagccgggtccccagacagagctctccctcaccacccggctcaggactcatgatcccgtttttccccaaaggtcgttccactgacccccaactgcctacagccccgtcgccctaatcccccgccactgcatcggaccctcctgcggccccgcccccgagacctcccctcccgccccgccccctgcgctagttcccctcccctcgcctcccccgccgcgcccccgggtcatacccgccccctcctgccccgcccccagatctctctcccctccccctgacgcccaccctcggcccgacttcgtccgcccccggcgcctctccccctcccctgaccctcgcgtgccgctcccagcccctcatcctctccgatctcccgagccgcccaaggccccagatctctctccccggccgtccccgccccgcagggcctcaagcccctgcgttcctcacgcaccccacggactctttgagcttctgaccgggtcccgcgctcttgaacttgatgtcggccttgaactcctgaaagaatttcttcatggtggcggctggcccggcggcggggggccgcgggggcgggggggcacggggcccagtcggggacggggccgccggagaccagccaccggaagaaaattaaaaaaaaaaaaaaaaaaaaaaaaaaaatttacctcgccgccggaagtcccgccttcccctggcctgccacgtgacaatcgactagacgtgcctctctagcgctcggtgccttgctggcccagggcggccgctctgtacgctggagccgcgtctctgtggttcttccggactccgttgccagggcgacgagtgcacctctcgattggagacagggcattccgtggcgctccccaaacggtgacaaacggtgataggacagggacaggccaactgaacctcgcagagaaagcactgggccctatccctttcgctgctcaacctaaactaggcgcggtggctcacgcctgcaatcacagcactttggaggctcaagcggaaggattgcttgatcccagaagttggagaccagcctggcaacatggcaaaacctcgtctctataaaaaaaaaaaaaataaaataaaataaattagccgagggtggtggcgcgcgcctctcagctacttgggaggcagaggcgggaggatcgcttgaacccaagaggtcgaggctgcagtgagctgtgatcaagccactgcattccagcctgggcgacagagagagaccctgtctcaagcaaaacaaaaaaaattccaaccttctctgtctccccagagcttacgtgataaaatcccaattcaatgttgggtattggaggcccccacgatctggcctgttttggtgcctgaagcacccccccgccaccatcaccacgtaccctaggtaggagctgtttaagaggatgcacctgggccgggcgcggtggctcatgcctgtaatcccagcactttgggaggccgaagcgggcggatcacaaggtcaggagatcgagaccatcctggctaacacggtgataccccgtctctactaaaaatacaaaaaattagccgggcatggtggcaggcgtctgtactcacagctactcgggaggctgaggcag[136 bp omitted]ccaattgggacctggggattggggatccactttggtggacaccagttaatagtggcgtactttggtctgtgcaatccacaaagaagatacacaaagtgacagttaaaacaagcctcaaaaaatgggagttgggggtcagacgtggtggctcatgcctctaatcccagcactttgggaggccgaggccggcggatcacttgaggtcaggagtttgagaccagcctggccaacatggtgaaagcctgtctctatgggcaccggtaatcccagctactcgggaggctgaggcaggagaatcgcttgaacccggcaggtggaggttgcagtgagccgagatctcgccattgcacttcagcctgggcaacagagggagactctgcctcaaaaaagaaggagttggaatgagatacacagagactgatggaggagaagcctccaggtgaggaaacagcccaccccaagactgaaattgaaatatcatgggttggacgggtggctcaggcctgcagtcccaacattttgggaggccaaggtgggaggattgctttagcccaggaattggaggctgcagtaagctaggatcacgccactgcactccagcctgggcaacagagccagaccctgtcttattaaaaaaag[134 bp omitted]ttttaaaaaaattagccagccttggtggcgggcgcctgtagtcccagctacttgggaggctgaggcaggagaatggcgtgaacccaggaggcagagcttacagtgagccgagatcatgccactgtgctccagcctgggcaacagagcaagactccgtttcaaaaaaaaaaaaaaaaggaaaagaattgggccaggtgcggtggctcacacctgtaatcccagcactttgggaggtcaaggcgggtggatcacttaaggtcagaagttcaagaccgacctggccaacatagcaaaaccccgtctctattaaaaatacaaaaatcagccgggtgtggtggtgtgtgccagtaatcccagctacttgagaagctgaggcag[147 bp omitted]cccaaacttcaatctttctgatctccagtctcctatctatgaaatggggataagaataacactctctatagattgtaggggtgatcatgtgattagaaagttctcagtatgccgggcacggtggctcatgcctgtaatcccagctactcaggaggctaaggcaggagaatcacctgaacttgggaagcagaggttgcagtgagccgagactgcgccactgcaatccagcttggcaacagagcaagactccgtctcaaaaagaaaagaaaagaaaattacagctcattgttgtgaataaggaattgtataccctataactcaaataaaggtacaacactgggccaaagtcacacagctggaaagtggcagagacccatcccacttctccaagaataaaatcctatggggttcctcagcctggtctaaggagatcctaacattaataggccctaataaatttctatttcaggttctaagtattctgagggtttcagaaaccccgtttcttgttatcacccacctttccacctctgcctcagttacctggaagtatttccagctcacctctgggcctttgcctaggcattctcctttaccagaagggacttctcttcctctgcctaactcaatcctcttccaccatgacgctctcctggactatcttcctcatgtcggatgaggttatgagattaaataatttaacatttctgccaggagcggtcggtggctcacaccagtaattccagcactttgggaggacaacatttatttttcttttcttttcttttcttttttttttttttgagatggagtctcgctctgttgcccaggctgcagtgcagtggcacaatcttggctcactgcaagctccacctcccaggttcacaccattctcctgcctc[212 bp omitted]tcttccccacgctggagtgcagtggcacaatcatggctcactgcagcctagaacttctgagctcaagcagtcctccccactcagcttcccaagaagctgggactgcaggcatgtgccaccacactcagctaattttttttttttttttttttttgagaaggaatttcgctcttgttgcccaggctgtagtgcaatggtgcgatctcggctcaccacaacctccatctctcggattctcctgcctcagcctcccgagtagttgagattacaggcacccgccaccatgcctggctacttttttgtatttttagtagacacagggtttctccatg[136 bp omitted]ggctcacgcctgtaatcccagaacactggggggccgagggaggaggattgcttgagccctgatgttcaagaccaggatgggtaacatagtgagaccttgtttctactaaaaaataaaaataacaggccaggcacagtggctcacccctataatcccagtactttgggagtctgaggtgggtggatcacaaggtcaggagttcaagaccagcctggccaacatgatgaaaccttgtctctgctaaaaataaaatacaaaaattagctaggggtggtggcagcacctgtaatcccagctactcaggaggctgaggcagagaatcgcttgaacccgggaggcagaggtcacagtgagccaagatcatgccactgcactccagcctgggcaacagagcaagcctccatctcaaaaaataataataataataaataaaataaaaataacaccctgggcaacatggcgaacccttgtctctaccaaaaaaaaaaaaaaaaaaaatcagtgctggttgtgcctccctgtaatcccagctacttgggaggctgaggcatgagaattgcttgaacctgggaggcagaggttgcagtgagctgagatcatgccactgcattctggtttgtgagactctgtctcaaaaaacaaacaaaccaaaaattagtgaggcatggtggtgcgcacctgcagcttcagctgcttgggaggctgaggcaggaggagatcgagaccatcctggctaacatggtgtaaccccgtctctactaaaaatacaaaaaattagccaggtgtggtggtgggtgcctgtagtcccagctacttgggaggctgaggcaggagaatagcgtgaacctgggaggtggcgcttgcagtgagctgagatcgcgccactgcactccagcttgggcgacagagcaagactccgtctcaaaacaaaaaacaaaaaacaaacaaacaaacaaaaaaccattaaaagataaactcggccgggcgtggtggctcacacctgtaatcccagcactttgggaggccaaggtgggcggatcacgaggtcaggagattgagaccatcctggctaacatggtgaaaccccatctctactaaaaatacaaaaaattagccgggcgtggtggtgggcgcctgtagtcccagctactcgggaggctgaggcaggagaatggcgtgaacccgtgaggcagagc[131 bp omitted]gtattatactgatggggtctcgctaggttgcccaggctggtatagatctcctggtctcaagtgatccccctcaacctcccaaatcaccaggattagtggtgttaaccacctcgcccagcgtttgattgtaaagctgttggaactttaaattattcttcttattattatttttgagacggagtttttgctcttgtcacccaggctggagtgcaatggtgtgatctcagctcattgcaacctctgcctcctgggttcaagcgattcccctgcctcagcctcctcagtagctgggattacaggcacacgccaccacgcccggctaatttttgtatttttagtagagacaaggtctcaccatgttggccaggctggtcttgaactcctgacctcgtgatccacccaccttggtctcccaaagtgctgggattacaggtgtgagccaccgtgcctggcccaaaaattttttatacagatgtggtcttcctatgttgcccatgctggagcacaactacagtggccattcacaggcacaatcatgggtcactgcagcccagaactcccaggctcaagtgatcctcccacctcagcctcccaagtagccgggactacaggcatgagtcactgcacctagcttaaccattgcaacctccgcctcctgggtttaagtgattctcttgcctcagcctcccgagtagctaggattacagccaccacgcccagctaatatttgcatttttagcagagacagggttttaccatcttggccaggctggtctagaactcctgacctcctgatccacctgccttggcctcccaaagtgctgggattgcaggtgtgagccaccgcgccccgcaattttttttttttttttttttttttagaaagagtcttgctctgtcacccaggctggagtgtagtggtgcaatctcagctcactgcatgctctacctcccgggttcacgccattctcctgcctcagcctcccgagtagctgggactacagatgtccaccaccacgtccggctaattttttttgtatttttagtagagatggggtt[132 bp omitted]ggcctcaagtacattcgcattgttgtgcaaccattacagcaatcgttacatttcatctagtgaaacgtaaattctgcctaattaagtaataactacccccaaccctgataacctctagtctacttttcgtctctatgaatttgacaaccctagggacctcttatgagtggatacatataagacagtacttgtctttttacgtctggctgatttcactgaggatatcgtcttaaggttgcagcctgtgtaacaaatagtttttaaacgatactgcaggccgggcacggtggttcatgcctgtaatcccagcaatttgggaggccgaggctggtggatcacttgaggccagcaattcgagaccaggctggccaagatgatgaaaccccgactctaccaaaaatacaaaaatttgccaggtgtggtggcacgtgcctgtaatcccagctactcgggaggctgaggcaggagaaacccttgaacccaggaggttgagattgcagtgagccaagattgtgtcacagcactccagcctgggtgacagagactccgtctcaaaaaaaaaaaaaaaggaaaaaaaagatattgcaccagccttggcaacatggtgaaatcccatctctacaaaaaaaaaaaaaaaaaaaaattagcctgccatagtggcacacacctttagtcccagccacttgggggactgaggcaggaagattccttgagctcaggaggtcaagcctgtagtgagccaagattacaccactgcactccagtctgggtgacatagtgagactgtttctcaaaaaaaaaaaaaaaaaaaaaaaaaaattgcatggggccgggcaaggtggttcatacctgtaatcccagcactttgagaggtcgaggcaggagggctgcctgagctcaggagtttgagaccagtctgggtaacaaagtgggatcccatctttataagaaattaaaaattaaccaggtgtgctggcacatatctgtagtccaagctactcaggaggctgaggcagggggatcacttgagcccgaagtgtagaggctgtagtgagctgagatcatgtcactgcactccagcctggtcaggacagcaagatcctatctcaaaaaaaaaaaaattcttggccaggcgcggtggctcacgcctgtaatccagcactttgggaggccgaggcaggtggatcatgaggtcaggagattgagaccatccagagaggccaacagggtgaaaccccatctctactaaaacacaaaaaattagctgtgcttggtggcgcacactgtagtcccacctactcgggaggctgaagcacgggaatcgcttgaacccaggagtggaggttgcaatgagccaaaatcgcgccactgcactccagcctggtaacagagcaagactctgtctcaaaaaaataaataagctgggtgtggtggctcacgcctgtaatcccagcacgttgggaggccgaggtgggcagatcacgaggtcaggagttcgagaccatcctggcgaacacggtgaaaccccgactctactaaaaatacaaaaaaaaaaaaaaattagccaggcgtggtgcctgtagtcccagctacttgggaggctgaggcaggagaatggtgtgaacctgggaggcggagcttgcagtgagctgagattgcgccactgcactccagcctcggcgacagtacgagactctgtctcaaaataaataaataaataaataaataaataaaatgcatgggagatatttatactaagaaatcattcagccagatgttgtggctcatgcctgtaatcccagtaatttgggagactgaaatgtgaggatctcttgaactctgatgttctagatcaccttgggtgacataagtgagacgctgtctctaaaacaaacaaaatcatgtgatgtgtatctgctcttcagatgtaacttgacatcctgaattttaactggaaattctaactatagcccttctcaatgtagcaggctaaaggatctttttaaaaaaaaaaatggctttggccaggtgcagtggctcacatctgtaatcccagcactttgggaggccaaggcgggcagatcagaaggtcaggagatcgagaccatcttggctaacacggtaaaaccccgtctctactaaaaaatagaaaaaattagccgggcgtggtggcgggcgcctttagtcccagctagttgggaggctaagacgggagaatagcgtgaacatgggaggcggagcttgcagtgcgccgagatgtgccactgcactccagcctgggcaacagagtgagactgtttcaaaaaaaaaaaaaaaaggctttatttattttttgagatggagtctcactctgtagcccaggctggagtgcagtggcacgatctcggctcactgcaacttccgcctcccaggttcaagtgattctcccgcctcagcctcctgagtagctgggattacagcgtgcgccaccacgcccagctaatttttttgtatttttagtagagatagggtttcaccatgttggtcaggctgatcttgaactcctgacctcgtgatctgctggccttggcctcccaaagtattgggattataggtgtgagccaccatgccccgtctgtttatatatatatatatacacacacatatataatatatacacacatatattatatatatatattatatatacacatatataatatatacacacatatatatacatatatattatacatacacatatatattatatatacatatattatatatatacatgttatatatacatttatattatatatacatatatattatatatatacatatatacatatatgtatattatatatacacatatattatatatgtgtgtatatatacacatatattatatatacacacatatgtaatatctaatatataaacacacatatataatatattatatattatatatttaatatatgtattatatataatatataatatatacaatatataaatatatattaatatataatatataaatatatataacataataatatataaatatttaatatatatttatataaaaatatatattatataatatataatatatattatataaaaatattatatataatatatattatatatatatttatctacatacaatatatatatatattttttgagacagagtctctctgttgcccagtctggagtgcagtggcaccatctcggctcactgcaacctcagcctcctgggttcaagcaattttcctgcctc[134 bp omitted]gcctcccaaagtgctgagattacaggcgtgatttatttttaatacggacagtcttgctatgttggccagggtggtctcaaactcctggcctcaaacaatcctcccgcctcaagtgctaggattacaggtgtcagctaccgtggtcacccagctttactgatatataacttacataccatcaatttcacctctttcagtatataattcaatgaagtttatcatgtatttacagaattgtacaaccatcatcacaatctaaatttagaaagcttgcatcatcctaaaaagacacctcaggctgggcttggtggctcacaccagtggatcacgcttgtggctcactttgggaggccgaggcaggcagatcacctgaggtcaggagttcaagaccagcctgcccaaaatggtggcacacaccaccactccaggctaattttttgtatttttagtagagacagggttttaccatgttggccagactagcctcaagctcctaacctcaggtgatctgcctgccttggcctccaaaaatgctgggattacaggcgtcagtgactgcgcctggtcagccttcttaaaggccatatctccaatatggttccatgggaggtctgtgcttccacatacacatttgagaggacggtacaaaattcagtccctagcaggtaggaatggaattgctgggtcatatggtaagtctatgtattttctttttgttcttgttttcagacagagtcttgctctattgcccagactggagtgtattagcacaatctcggctcactgcaacctctccctcttgggttcaagcaatcctcctgcctcagcttcccgagtagttgggattgcaggaatgtgccatcacacctggccaatttttttggtat[161 bp omitted]tctcctgcctcagcctcccaagtagctgggactgcaggtgcccgccaccacgcccggctaattttttgtatttttagtagagatggggtttcactgtgttagccaggatgatctcgatctcctgacatcgtgatccacctgcctcggcctcccaaagtgctgggattacacgcataagccgcggcacctggcctatgtttaatttttattttatttatttatttttttgagacgaagtctaactctgttgcccaagctgcagtgcagtggcgcaatctcggctcactgcaaccgccccctccgggttcaagcgattctccctgcctcagtctcctgagtagctgggactacaggcacacaccatcatgcccagctaatttttgtttttcagtagacatggggtttcacta[139 bp omitted]atggagtgcagtggtgcaatctcagctcactgcaaccattgcctccctgggctcgatcctcattcctcagcctcctgagtagctcagagtagaagtgtgcggatcatgcccaactgatttttatattttttgtagagatggggtttaaccatgttgctcaggctggtctcgaactcctgggctcaagcgaattttccacctcagtcgtgctgggattactggtgtgagatgccatgccaggccttacgtttcagttttaaagaaatggtctttgttgatccatatttcacatgcatagggatgttttttgagaataaaatactctctttgtatcctctgatcagatccccccaatagtttcccaagaagttaaaataaaacccaaacttctcatttatgtttgtaatgtattgtgataggtcctctacggacccctccagccctccagctttatctgtttcccctactcacacacagtcatcctaggatcagatgggttttttgttgttgctgttgttgttcttgtttttgcttgtttgctttttcttttcttttctttttttttttgaatcaaagtctcgctctgtcacccaggctggagtgcagtggcatgatcttggctcactgcaacctccgcttcccgggttcaagtgattctcgtgcctcagcctcccgagtagctggaattacaggcgcctgccaccacgcctggctaattttttgtatttttagtagagatgcggtttcaccatgttggccagggtggtctcaaactcctgacttcaagtgatctacccgcctcggcctctcaaagtgttgggattacaggcgtgagccaccgcgcccggtctcgtttgttttttgcaacggagtctcgctctgtcacccaggttgtagtgtaacggcgtgatctcggctcactgcaccctccgcctcccaggttcaagtgattatcctgcctcagcctcccaagtagctaggagtataggcgcccaccaccacgcccggctaatttttgtattttttctagagatgggatttcaccatgttggccaggctggtctcgtactcctgaccttaagtgaggatcagacgcttgtttttgctcttccctctgctcctcatgccctcccagggctcgcctcactatcatgtccaacttctattcattctcccagtgtctggttaaactcacttcatccagtaaccctctgtgatcccccaggagagaagaagtcgtctccattattcagctttttttcctcaagcaccctggttcattttagttcttaccatggatcctaattacaaaaaacaaaacaaaacacagcaacatcaacaaattttaaaacttaacatttcttggccctgttatacttgattcctggaaggtagagttttgttttttgtttttgttttttttttgagacagagtctcgcgctgtcgcccaggctggagtgcagtggcacgatctcggctcactgcaagctccgcctcccggggtcaggccattctcctgcctcagcctccctagtagctgggactacaggcgcctgccacc[185 bp omitted]ccagtctggagtgcagtggcgcgatctcggcttactgcaaccccccgctcctgggttcgagtgattctcctgc[134 bp omitted]gtcctctcaaagtgccggggttacagccgtgagccatcgcgtccggccgagttatagcttctaatacttcctgtatttcctgttgccgggctcagtctagagcagggtcctcacaatcattatgggccccatcttccaagtgcagagagcgaagcccaggacaatcaagtgactcggccccacggtattcagtacatttttcttgaatgaatgaataggtctgtgtggcgttttggggccctggcatatagtaggtactcagttaagtttttaactaagtgaagaaataactattttgtgcattttgtggctgtttatactaagagctcccccggagcctgccccttcctctaagtcccgcctcctcgagctggcaatcgcccgtccctgttttatgttgtatcgctcttctttcgatagccaatggccgacgttcccgctgaagccccgcctcttgtgatggccaatgcctgctccctaccttgaggcgcttctcttgtggtatccaatggcttgcatatctactttaagcctctcctcctgagcgggagaggctgtcaatgacccgcccattgcgttaagtgattggccttcttttctgcggtatccaatgttctgccctccttatatccccttctcttgtggaggtctatgtcctgcctctttcccttaagctccaccccttcactcccttagagcgtctgttcgtctcctcccacctttccctttcacctcccataacctcccattagagtctctgggttacgccccttgggtctgtccgttatccaatcccgttaactgctgtgctccaacctctgttcttattggtcgcctcccttctctgtcccctgcacgtggtcctgatcgacggctttgccggcccgtgacggccggagggctgaacttccgttggcgcaacgcccaataagcgcgcgtcggcaggctgcccagacagcctcccccgccccctcggcgtcccgctcccgcccccggcttcgcctcccgctgccgccgccgccgccgccgcagccgctaccgccgctgcagccgctttccgcggcctgggcctctcgccgtcagcatgccacacgccttcaagcccggggacttggtgttcgctaagatgaagggctaccctcactggcctgccagggtgaggccgcgcgggagatggggccggtgggggggggggggggggcagcgggggccccgggccggaggcgggcactggagggccggggttgtcctgggcctgaaggagctgcgccccgggggtctggggttcatggggtctgggggtgtccgagacccgcagcggccccgccctgggggtctgggggtcctgggccgcagggagctgcgccctaggggtctggggttgtccggggcctgccggagccgcgccccggggtctagggatcctgggcctcagggagccccgccctcggggcctgggggtcctgggctgcagggagccgcgttcttgtggtctggtggtgttcggatcctgcaggacccgccgtctgggcctgcaggagcccctcccggggtctgggggtcctcggcctcagggagctgcgtcctggggttctgggggtgtccaagccctgcaggagccgcgccccggggtctgggggccctgggcctcagggggccgcgcctaggggttctgagggtgtctgcggcctgagagactctcgcccttggtgtatgagggttttggggctcagagagtcgctccctgggagtctgggggtatcctgggcccgagggagtcgcaccttgggggtttgggggtgtttggggcctgaaagagccgcgcgccgacggtctgggggtcccgggcccgaggaagcggtgccctgggggtctggggcctgataaattctcactctgggggaatggcggtcctggacctgagggagctgcgccgtggggatctggggggtgtccagggcctgaaggagctgcggcgccaatggtctgggggtcctgggcctgaggaagctgcgctctgggggtctggggcttctgtgcctgagggagctgcaccatggggatctggggttgccctggcccagagggagccacgcctcgtgtgtctgggggtgtccagggtgcctcagggagccgtgcgcagggtgtctgggagggtctgggacctgagggaccctcacctgagggcctggggatcccaggcctgagggctcaaggttcaagtttgagcagaactgcggaacttgagatttggggtcagatatgggggctgaagcactcccttgtgggtcctggagaagcccagttttgaggggctggggggccgagggccatgtgctaggggtccagggttggaggaggcagtcaggggggaaggttgagggtcaaggctaagggaagctgggacctctgagtgaggggctgggggtgggggaatggggctcggggctctgttcacggggtcactgggactcggggaactggaccttagaatgaagttggcatcgggactgttgggggaccctggggattggtcccctgtggggaggaggatgtagaagctggttttggagggacttgagggtggggtggtccaaccccaatgcttgaaatggagacaggcccgggcccagggagtgggagcgcttctgagggaagggggctggccgaggggaccttggatgcccctttggtggaagctggggtcccgacgacctggatagtcccaggtgtcctggcctgaaggatattccgcaccttggagtcccaggtgtggagggggtgagttccaggccctgagaggtacaggccagcgggaagcagggaccccaggctattgtcatccccaggtcttagggctgagtctcccagggctgaggttggtggaatttgccgggcaggactgaggaatttggcactgggggtggaaggctggggcagcagggaggggctgtggagggggacaccaaacggtgctctggaccagaaccagcccaggtccgaagctggcaatgccgctgggatgggtgggcctcggaggaccgtgggcgggtcttgggagaagcggggctgtgaggcatgccgggctggtcctcgggtggactgaatttaggatgcttctggcgggagagggatgctgggcctggcggcccatggccgagcccaggggccagggactctgataaagtagctctgaggagacccaagcgagaaggaagctgggtgagtggggcagggaagatcgggagccccctagaagctggagacgtggatggggaaggaatgcattgggaggggagaagccactccagcctgctgtgctcgcgctgactttcttgggggagaccagagcaatgcaactttataggcacttccctccctttcccagctctcttcttcccagagcactcgcttttctctcccccgtccccccttctccagcctgctctcctagccccaaacgtttccaagcacctgattggaagtgaaggggctgttagtctcctgtggggaggtgactgacagctgccggagcccatgggcctgcagggagagggtgggacttcctggatgctcagggccgtttcttgtagcccaccccccaccctctgcatccttggagctgccagctgcatcctctgggggaccgcccgtgagcccctctttgcgggaggggtccccaggaaaggtcctgggagtccatagacgctgagcttggccccaccccctggttgcttcagagggccggatctggctttgctcaggtggagcacctgccctggggccagctccgtccctggggtagggggagagctctctgggtggggcacagctttgcagtgaagggtacacagaagaatgcagcttcccatcgggaaggggctgctgcttcctgggttgaaggctcccctcctcccagcgtgatttgccccaagtaacttggctgatttctcggtgatttcctgggtcagtgggtaaagccaccccctcactggcctctcactgcagatcgacgacatcgcggatggcgccgtgaagcccccacccaacaagtaccccatctttttctttggcacacacgaaacgtaagtgtccccttctggggcttggttttctcctctggtgcctcccggggtggcctcactcacctgggactggcccccgtttcccttctccagagccttcctgggacccaaggacctgttcccctacgacaaatgtaaagacaagtacgggaagcccaacaagaggaaaggcttcaatgaagggctgtgggagatccagaacaacccccacgccagctacagcgcccctccggtgagtacccggggtggagagccagtgtgaagcgcgctactgatgcaagaaggggcctccagttagggtctctcccctgggcactgtggacacatggggctcgatcgttccctgtggtggggcattctgggccctgcaggtgctgagcagtgtccctggcctccacctactcagtgccaaggccacccccaccccattcatggtgatgacagatgtccccagtcattgcccagtgtcccctgggtggaggggaacggg[136 bp omitted]ctcctgtattcccgccattctcctgcctcagcctcctgagtagctgggactacaggtgcccgccaccacacccggctaatttttttgtatttttaatagagacagggtttcactgtgttagccaggatggtctcaatctcctgacttcgtgatccacccgcc[134 bp omitted]acctctgcctccgggtccaactgactctgctgcctcagacgcccgagttgctgggattacaggtgcccaccaccacacccagctaatttttgtatttttggtagagacagggtttcaccatgttggccaggctggtctcgaactcctgaactcagatgatccacccgcctcggcctcccaaagtgttggggttgcaggggtgagccactgcgcttggccagcccgaatttctaacagagtgttatcatagctctcataaaaccttttattttcttaggaaaagacgtttttttcttttgagaagagccccctctttcactgttactgccagattttagaggagtgaaaagtctgtagtgtgtagatgtgagcgttctcagtcaggtggaaaaaaacaccaagaatcagatgacatctcattggcaaatgagtgtctggaaatagtcagggaaaggaaggaatttagaaaagcggaaggcaaatggctaaaaggcagtggaaggatgggagaaaggtgccttactctgagtattctggggtgaggtggggagtgggggaactgggctggggttctttcctctgctttaaccacactgcttttgaggtttctgtgacaggctgggggccggggttagtagcccaggcttagctgggggggcatgaatttggcggggaggcccagggaactgaccacaagctagggaaaacttggccattaaggaagaaaagcacatccgaggtggtctgagtggagcaaggcaggaggggcccagcctttggcttttgcgagtggaggatgcagtctctttgtggttcctggtcctgtttgagaacctggggtcttgaggtggcctgtctgtgcctctcctttgtttcggcctgggctgggtggtgcttgtgagcatttgctccaggatccgcagacgtttcggtggtgacacctgccacgcacacgtgccgcactggggaccaggaacagggatgagtcaggcacagtccttgccttctgggagctcatggtccagaattgaggattcactcaacggatgtcccttgagcgccgaggatctggcagccccttctcagggggccggggcccaccgatgttgcatgctgagggtattttactttaacacccatggtgtgtctaggagactgaggtttccctggtttcatacttgctatctttcctcacgctgtgcctgtccccagcctggaaggataggtcagaaatccttcaaggtagctgtttcaggagatctttttctggccccaggtcaagttctctttggttccgtcctgagctcattacctcctggtgaatcatcacaccatttaatatttattggacacctacagcttgctaagcattatatagaggcctgtctttgaggaaaggaaattaaacaagccctgtacagatcccccaagatgagaagtagctttagttgaggccactgctgctcttagcttctctggcccatctatgcttctagatggaacgtgtgtttaagatgcagattcctggctgggcactgtggctcacacctgtaatcccagcactttgggaggctgtggctggtggatcacgaagtcaggagttcaagaccagcttggccaagatggtgaaacccagtatctactaaaaatacaaaaattagctgggcgtggtggcaggcgcctataatcccagctactcgggaggctgaggcaggagaattgcttcaacgcgggagggagaa[132 bp omitted]gatgggagccctgaagtttttcttgccaa[136 bp omitted]ctgcctcagcctcccgagtagctgggactatgggcgcccactaccatgcctggctaattttgtatttttagtagagacgatgtttcaccatgttggtcaggctggtcttgaactcctgacctcaggtaatccgcccaccttggcctccaaagtgctgggattacaggtgtgagccaccacacccagcccaggctcattcttttaacagccttagcgcaactactaatgccaccaagagcggacaggaaggcctgggtcccatccccttgcgaagccagtaggtgaaacatggcagcttggcctggttccacttgcatcgccttttggtcctcacagtaatcctcagagtggcccaggtgggtagttggttggttggtttttttttttcagacggtgtctcactctctcgcccaggctggagtgcagtggtgcgacctcggctcactgcaacctctgtctcctgggtttaagtgattcttcttctgcctcagcctcccaagtagctgggactacaggcatgtgccaccacgcccggctaattttttgtatttttagtagagacgggtttcacca[139 bp omitted]ctcaaggggttgctcagatgggccaggcatggtggctcacgcctgtaacctcagcactgtgggaggccaagggggcagatcacttcaggtcaggagttccagaccagcctgttcaacatggcgaaaccccattctaccaaaactacaaagattagccgggctcacgcctgaaatcccagcactttgggagactgaggaggggtcacctgaggtcaggatgtcaagatcagactggccaacagaatga[136 bp omitted]cctgtctctactaaaaaaaaaatacagaaagttagccgggcgtggcacctgtagtcccagctactctggaggctgaagcaggagaatggcatgaacccgggaggcggagcttgcagtgagctgagctcccaccactgcactccagcctgggcgacacagcgagattccatctaaaaaaaaaaaaaaagaaagaaagaaaccccgcctctacccaaactacaaaaattagccacgcttacacctgtaatcccagcactttgggaggccaagagggtgggtcacctgaggtcaggaggtcagaccagcctggccaacacagtgaaaccctgcctctacaaaaatataaaaattacccagatgtggtggtgggcacctgtaatcccagctactctacaggctgaggccggggaatctcttgaacccgggaggcggaagttgcagtgagctgagatgctgccactgcactccagcctgggcgacagaatgagactctgtctaaaaaaaaaaaaaaaaaaaaatttgcttagatgcccagagggacccagctggtgtctgaagccttgtagacccaggccacggtttctcagcatcagtaccttataagagagtatagcagtgacagttggggccaggtcattctctggcatagggtctgtcctgggcattgcagggtgttgagcagcatctctggcctctgctcactccatgcaaggagcgcccactggtaatcttgatgaccaaaatgtctctagacatttgacctagaaggatcccacctaatacatccttgttgcttggtagatgaagaggtagagagacctgtccagggttctcaagcttgtgagcaacagagctgagctggggtcagaaaccagggcccccagcttgcaggtcccccaactcccagatcccctgactccctggccccccagctcccaggctggcattcttttccttctggctggtacaagccaggggcaggccctggaggatgggagtc[132 bp omitted]gaaaccccatctctactaaaaatgcaaaaattagctgggcatggcggtgggtgcctgtgatcccagctactcgggaggctgaggcaggacaatcacttgaacttgggaggtggaggttgcagtgggctgagattgtgccattgtactccagcctgggggatagagtgagactccgtctcaaaaaaaaagtgggagctggggccaagagcctgttgtatgagcgggtggacctgggagccaggcctggctctgccctgtgctcactgtgaatcttgaccattgacatcccctctgtgagcctcagtttccttattttttattattttttatttttttagactgagtctcactctgttgcccaggctggagtgcagtggcatgatcttggctcactgcaacctccacctcccgggttcaagctattctcctgctttggcctccctagtaggtgggattacgggcatccaccaccaaacccggctaatttttttttttttttgagacaagagtctcactctgtcgcccaggctggagtgcagtggtgcggtctctgctcactacaagctccgcctcctgggttcacgctattctcctgcctcagcctcccgagtagctgggactacaggcgtccc[137 bp omitted]gcctcccgagtagctgggactacaggcgcccgccaccactcctggctaattttttatatttttagtagagacggggtttcaccatgttagccaggatggtctcgatctcccgacctcgtgatccgcccgcctcgg[135 bp omitted]gcatcccaaagtgctgggattacaggcttgagccaccgcgcccggccaatttttgtattttttagtagagatttcactatgttggccaggctggtctcgaactcttgacctcaggcagtcctccttccttggcctcccaaagtgctgggattacaggcatgagccaccgtgcccggccctcagtttcctcatctaaaacagaggatttggtagtgctgacccctcagcgggctcctgggagagtccggtgagaaattgcacatcgacacttaggaagcgctcactggatggtggaggggatatttgggaacagagaggcaaagctggatttgaccttcccttttccaatttagtcacaccccctgccctgatcctccaagacagctacagaaatgagctgttcccctcactctcagccggggggactggaagttggctggctttggccttttttttttttttttttttttttgagatggagtctcgctctgttgccgaggctggagtgcagtggcgcgatctcggttcactgcaagctccacctcccaggttcgcgccattctcctgcctcagcctcccacagtgctggaattacaagtgtggcttactgcgccctggccttgttttttctttctttctttttttttttgagatggagtctcgctctgttgcccaggctggagtgcagtggcatcatctcggctcactgcaagctccacctcccaagttcaagtgattctcctgtctcagcctcccaagtagccgggactacaggcgcacatcaccacacccagctaatttttgtatttttagtagagatggggtttcaccatattggccaggctgatctcgaactcctgaccttatgatccacccctatcggcctccccaagtgctgggattataggcgtgagccaccgtgcccagccattatttttttcatagagacaggcaacactttgttgcctaggctggtcttgaattcctgggctcaagtgatcctccttccttggcctcccaatttgccgggattacaggagtaaaccacgggccctgctaaaggaaagatttttaatgaggagtggctatgacccaggcttcgaggccaagacctgctcgtgctttcatctcagatctgcagttactcgctgtgtgatcctgagctgttacttgacctctccctgccttttttcctcatctgcagaatcaggctggtcatgcccaccggttacatggggcattgataagtcctataactgccggtggctcctgggttcgtggcactcaccagctcctcctgtggaagatcctggggcatcagggttgggtcaggggcggggctgggtggagggagcgaccaggaaggagcccggggctcctcattctctgagctgctactccccacccccagcgcttgtctccttaccagggatgctccaaagagaaaccccaggtacgcgagcccttccccaaaggctctgtggagaggcgtgatcgagattggccgcgagagcgttattactctcagcgttctccgtttgcggcctgacctacttagtattaccctttttaatcttgtcaaaaattacacagacagggccctgtcgcttgggccacgaagacacaagggagacaaaacgtgctcgggccgagcggtgacgcttcaccacacccggttctcgttttccttgtgtgctgattgggggccgctagcctgcggctgtgcgcacggaggctggtgtgcgcctgctgtgggctcccagcctctcctcccggcgcgggaggaccaggctaagcctggagggagccgggaaactgaggaagggccgaggttccctcctgtggttccctcctcctggccccccctcttgaccagcgctgacgccctcattcctcaggccatgcttccattctgtccgggcatttctactcagacgctggcctcgcctgcagcatccgcccagccctgcaccgtgtactccctgctccctcttgcccggccgcaacacccggtcacaaacgtgggccttactctgcctgtccttcctggcctcgtctcccgcgagccccgtgacatgcctctcacccattctcacacccttatctcctccaccttgctctctcctggacaccatgcgtgccccactccagcctgtcacacgccattttggtcatcacaccaggagaatgggacttaattgtttcatgattttttttttttttttttttttgagacagtcttgctctgtctcctaagctggagtgcagtgacgctatctgggctcactgcaacctctgcctctcgtgttcaagcgattctcctgcctcagcctcctgagtagctgggactacaggcacctgccaccacgcccagctaattctttgtatttttagtagagatggagtttcattgtgttagccaggatggtcttgatctcctgacctcgtgatctgcctgccttggcctcccaaagtgttgggattacaggcgtgagccactgcacccggcctttttttttttttttttttgagacagtgtctgtcacccaggctggagtgcagtggtgtgatttcagctcactgcaatctctgcctcccaggttcaagtgattctcgtgcctcagcctcctcagtagctgggactacaggcgcctgccaccaggcccggctaatttttgtatttttagtagagacagcatttggccatcttggccaggctggtctcgaactcctgacctcaggtgatccacctgcctcggcctaccaaagtgctgggattataggcgtgagccaccacgcccggcctgttttattattattttttttcccatcgagataacttcaccattttaatcatttaagagtataccgtacagtagcttctagtacattctcagtgtaccattcttgctaattccaggatattttctttttttttgagacagagtcttcgctctgttgcccaggctggagtgcagtggtgcgatctcggctcactgcaagctccacctcccgggttcacaccattctcctgcctcagcctcctgagtagatgggactacaggcacccgccatcacgcctggctaatttttttttttttttttttttttgacacggagtcttgctctgtcatccaggctggagtgtagtggcacaatctcagctcactgcaaactccgcctcctgggttcacgccattctcctgcctcagcctcccgagttgctgggactacaggcacccgccaccatgcc[169 bp omitted]tttcactgtgttagccaggatggtctccatctcctgagcttatgatccacctgccttggcctcccaaagtgctgggattacaggcatgagccactgcgcctggcccaggatattttcaacgcttcacaaaggaatcctctacctgctaggtatccccccaattctcttctcccctcaagcctcaggcaaccatggatccaccttctatctctctggatgggcctgtcctggacatttcatagaaatggaatcacacactgtgtggccttttgtgtctcacttctgtcagctgagcgtggcatcctcaaggttcatccatgctgtggcctgggtcagagcctcgtttcttttcatggccaagtcatattctatcctattgttataccacgtttgtttatcagttaacggacatttgggtttttttcagagaatgtggcttttaaaaatctcagttttggccaggcgtggtggctcacacctgtaatctcagcactttgggaggccgaggtgggtggatcacgaggtcaggagattgagaccatcctggctaacacagtgaaaccacgtctcaactaaaaaaatacaaaaaaaattagccaggcgtggtggcgggtgcctgtagtcccagctacttgggaggctgaggcaggagaatggcgtgaacccagcaggcggagcttgcagtgaaccgagatggcaccactgccctccagcctgggcgacagagcgagactccgtctcaaaaaaaaaaaaaatctcaatctcgtggggtgcggtagctcacacctgtaatcccagcagcttgggaggccaaggtgggaggattgcttaagcccaggagtttgagaccagcctgggcaacatggtgaaaccccatgtctacaaaaaaaaaatacaaaaacgttagccaggtgtggtggtgcaaacctgtagtttcagctgctcaggaggctgaggtgggaggatcacctgagcccaggaagttgaggctgcagtgagtcgtgatcgcgccactgcactccagcctgggtgacagagtaagaccccgtctcaaaaaaaaaaaaaaaaaaacaacaaccacgaaaactcaatctctctctgtcttcttaaaaaaaagcagttatttagaaaagaagtgacgggcaatcactcggtcaggtgttccacgctggcaaggctggcctgtgtgctgcttggtgcctgtgctgggagctgtggcagcacagcttgagcttgttgtaactgcgtggacttgtctgtctccccggtagaccatgagctccctgacagcagggactgcgttttagctgtttctatccccagtgcccagcacagagctgggcacatagcaggtgtgtcatgatgtttgttggaggacctagcaggtgtctcatgatcatcactgaatgaatgagtaatggggctgaggcaggagaattgcttgaacccgggaggcggaggttatggtgggccgagatcatgccattgcactccagcctgggcaacaagagcgaaattccatctcaaaaaaaaaaaaaaaggaaaaatcgcaatctctgccaagcacggtggctcactcctgtaatcccagcactttgggaggctgaggcgggtggatcacgaggtcaagagattgagatcatcctggtcaacatggtgaaaccctgtctctactaaaaatacaaaaaatacacctggcgctcatacattttcctcccacaagcatgagccacccacggcctaactcttcatcctcctcttcaccatctccacccgcttctctgtgccccatatgggtatatgtcagcttcttctggttcccaaggggaccttcactggtgccattcctgctctctggaacgccgctagctcctaccccttcccatgcttctgacaactcctctgtaaaaatgtcacatcctccgaggggcctcctcgatcacccagtgctaaacactctcctctctctctctttttttttttgagacggagtctcgctctgtcacccaggcaggagtgcagtggtgtgatctcggctcactgcaacctctgcttcctgggttcaagcaattctctgcctcagcctcccgagtagctgggattacaggcgcccgccaccacgcctggctaattttttttgtatttttagtagagacagggtttcaccatcttggccaggcaggtcttaaactcctgacctcgtgttccacccaccgcggcctcccaaagtgctggaatgacaggcgtgagccaccgcacccgggttctctcttacaaacggggtcttgctctatcactcagtctggagtgcagtggtgtgatcatagctcactgaaacctctgcctcctaggctcaagcgatcctcctgcctcagccccttaagcagctgggaccgcaggcccacaccgccacaccttgctaatatgtgcatcttttgtagagagggggtttcgccatgttgccc[131 bp omitted]tgcctgtcaccacgatttggaattgtctgtgtttaaatggcaatgttcagggtctcccgctagaaaaccagctcccaggggcaagggagatgccacggtcacttctgtgttcttgatgcccccggcccagtgcccgacactcatgactgctcagcaaacgttggctcagtgtgtgacccggtcacgtgcctggcacataagaagcatcagataggtgtttgtgatttctgtggctgtcactgcctgagcgggcattttgagtgtaggagaaatagcagtgcctggatggtagaagcccagaggtcttgtcctagcttggcttcttcctcctgataattgaatgacttaaaaaaaaaaaaaaggaaccatttcttttctttttttatttttttgagacagagtctcactctgttgcccaggctggagtgcagtggcgtgatctcggctcactgcaacctccacctcgtgggttcaagtgattctcctgcctcggcctcctgagtagctgggattacaggcgcccaccaccacacccatctaatttttgtatttttagtagagacagggttttgccatgttggccaggttggtctcgaacacctgacctcaggtgatctgcctgctgcagcctcccaaagtgctgggattataggcgtgagcctccgcgcccggccagggcagccatttctggacctcttgacatggtctcggcactgtcttaggtgctccacctcccacttccatgctttcctggtcacaggcctctgaggtcaaaactgagccatccccattgcccagaagtggtcactgaagcacagagggttgaagtcatttgccccaggtttaaccctgaagcccgcggcccgaccctagtgcccaccatacacgaatccatctcactctcctgccttcgttcttcggctcttctgggcctcggtttccccatttgtaaagccaggagacaacacgcctgacattcaggatcccgcatgtggttgccgtcctctgggtcatagtcctgatggggaaatccacccacgactggtggtgacgcgcgttctctgccccgactcccacagccagtgagctcctccgacagcgaggcccccgaggccaaccccgccgacggcagtgacgctgacgaggacgatgaggaccggggggtcatggccgtcacagcggtaaccgccacagctgccagcgacaggatggagagcgactcagactcagacaagagtagcgacaacagtggcctgaagaggaagacgcctgcgctaaaggtaggggaggaccaaggtgggctggcccttcatccccttgccctgatgtctcgcctggcagcttgctctcctgccctttttttttttttttttttgagacaaggtcttactctgtcgcccaggctggagtgcagtggcgtgatctcgactcgctgcaacctccgcctcccaggttcaagcaattcttctgcctcagcctccctagtagctgggattacaggcacctgccaccgcacttggctaatttttgtatttttgttagagacggggattcaccaggtccccaagttggtcttgaactcctgacctcaggtgatctgcctgcctcggtctctcaaagtgctgggattacagtcttgagccactgcgcctggccacctttctttttttttttttgagatggagttccctctgtcacccaggcgggagtgcagtggcacgatcttggctcactgcaccctctgccactgggttccagcaattatcctgcctgagcctccccagtagctgggattatgggcaccaccaccatatttttttttttttgagacggagtctcattctgttgccaggctggagtgcggtggcacgatctcagctcactgcaatctccacctcctgggttcaagtgattcccctgcttcagcctccgaagtagctgagattacaggcatccaccaccacgcccggctaatttttcgtattttagtagagacagggtttca[132 bp omitted]tatgcatttaaaaaaaattgagttatagtccatacaccatgagattcatccttcctgaatatacacctcagtggtttttagtgtgttcacggaattgtgcaaccattaccattattccaggagatttccgtcaccccaaaaagaaacctggtccccatcagctgatcctccgcatcccctcctctggcccctggcacccacacatccccttcctgcctctgtggaggggcctgtcctgggcatttcatagaaatggggtcacacactgcatagcctttgtgtccgccttccttcaccaagcgtgacgtcctcagggtgcatccgcactgcagcccgggtcagctccattcgtttcatttatttatttattttgagacggactctagttctgtcgcccaggctggagtgcaatggcatgatctctgctcactgcatcctccacctcccgggttcaagcaattcttttgcctcagcctcctgagtaactgggattacaggggcccgctaccacgtccggctaattttgtgtttttggtagagacggggtttctccatgttggccaggctggtctcgaactcctgacctcctgatcagcctgcctcggcctcccagagtgctgggatgacaggcgtgagccaccgcgcctggctgcctcccttccttttcctggccgggtcagattccggtgtgtggagggaacacggtgtgttgatccacatgtcgctggccatttgggttgtttccacttttgggccattccagatcaggctgccgtgaacgtttctgtacagagttttgtgcagatgtgtgtgttccattctcctgggtatattctctgtcctgccttttgaccatttctcactatttgggtgtagaaacaaaggaccagattctagcagcaaattcttttgatagagtcacgtgtactttgtattattttctgattctaaaatgataagccatatttatagtagataacttggaaaatgcaaagaacagagagaatttggaaaaaatacctgtagtatatgaggggtttctgagccaaggaaggattatttcttttttttctcttttttttttttggcgggtgggggatggagtttcactcttgtcacccaggctggagtgtgatggcgcaatctcggctcaccgcaacctctgcctcccaggttcaagcgattatcctgcctcggcctcctgtgtaggtgggattacaggcatacgccaccacacccagctaattttgtttttcagtagagatggggtttctccatgttggtcaggctggtctcaaactcccgacctcaggtgatctgctcgcctcagcctcccaaagtgctgggattacaggtgtgagccaccgtgcctggccaaaattagccatttttaagtgccccgttcagcagcattaagcacattcacgtggttgtgcaaccatcaccaccatcatctccagaactttctcgtcttcccaagctgaaatgctgtcccatgaaacactcactcccaccacccacccccccacccccccacccccccaccccccccggcgcagccctggtgcccctcatcctactttctgtctctgtgagtctgatggccctagggacctcctataagagtttgtctttttgtgactggcttctttcaccaagcataatgtcctcaaggttcaagatccctggtttgatcaggttctcagagggttcctggcccgccagagaggttccagagctcagctgtcgtgggtggtgggcagtcagctgggggcttcctgccaggagcccggccttcccatcactgagcattcaggccgttccccttccagatgtcggtctcgaaacgagcccgaaaggcctccagcgacctggatcaggccagcgtgtccccatccgaagaggagaactcggaaagctcatctgagtcggagaagaccagcgaccaggtgggccagtggctccttgggatggcagggaagcgtggtggctgccagtgggccccagttcagctcacttctctcccccaggacttcacacctgagaagaaagcagcggtccgggcgccacggaggggccctctggggggacggaaaaaaaaggtagcgtgcacttgactttgtttcccatgcccactcgtggggcacctctgcggtctccagtgctgtccccagggcagggcgggccatttctggagggggtgggacacggactgcagggtacccgaggggaccgcctctgccctgagcgtggcacctcgttatggccgcactgcctccaggagcccaccatctggtttggaaaggggcattctgggatgctggcatcagaagggagggaagcagtcctgacgcgcctgcatgagagtgagagagtgagaaagcaagagcgcgagagggacacagaagagaggagagaggtgtgtgccagtgtgtatatgagcggattgtgtgtgtgtgttctgtctctgtgcacgtgtgtcgacgtgcatgtgtgtgtgtgtacttgtgtgtatgcatgtttgtgaccatgtaggtgtgtatgtgtgcagtgtgtgtgtagattgtgcatgtgtgatgtgtgtgtcgtgtgtgcacatgtcgtgcctgtgtgtgtgtttctggtgcctgtgtccctgtgcctgtatgcctgtgtgtgtgtgtgctgtacctctcctctgcgtctatgtgttgtgcctctgtgttcctatgtgagtatatgtggtgcctgtgtgtgtgcctgtgtgtccatgtgtgcatactgttcatgtatctatgtgtctgtgtttgtgtgtctgtgtgtggtgtctgtgttgtgtgtgtttgtgtgtctggtgtgtccatgtgtatggtttgtggtatgtgtgttgtctgtgtgttatctgtgtatggtgtgtgttttgtttgtgtgtgttgtctgtgtggtgtgtgtgtctggtatgtgtgttgtctgtggtgtgtggtatgtgttgtctgtgtgtggtgtgtggtgtgtgtggtgtatgtgtgttgggtgtttgtgtgtctggtgtgtctgtgtctatggtgtgtctggtgtgtgtttctggtctgtgtgttatgtgtggtctgtgtgtgttatctgtgtggtgtgtgtgttgtctgtgtgtgtgtggtgtgtgtggtgtggtgtgtgttatctgtggtgtgtgtgtggtgtctgtgtggtgtgtatctgtgtgtgtggtgtgtgtgtgtggtgcgtgtgagttgtctgtggtgtgtggtgtctgtgtgtagtgtgtgtgtggttgtgtgtggtgcgtgtgtgttatctgtgtgtggtgtgtggtatctgtgtggtgtgtgtgttgtctgtgtgtggtgtgtgtgtgttatctgtgtggtgtgtggtgtgtgtgttgtctgtgtgtggtgtgtgtgttatctgtgtctgtgtggtgtgtgttgtctgtgtgtggtgtgtgcgtggtgtgtgtgttgtctgtgtctgtgcggtgtgtgtggtgtggtgtgtggtatctgtgtggtatgtgtgttgtctgtgtgtgtgtgtggtgtgtgtgttgtctgtgtgtggtgtgtgtgtggtgtgtgtgtggtgtctgtgtgtggcgtgtgtgtttggcagggtactcgggtggaggcggtagagcacggcagcttgtctgatgtggcctccgcacaagattttgcataaagaaaaagatgtccccactgggaaacccgggcttctgatgtacccggttcactgaggaagatgaggggaagggccagcagctgcccggcgtgcccagggccgcctgggatcccggttttcacttggggtggaggtgggttttgtgggtgggaggggattcggagccgggccctgagccgaggcccgcagagcctggcggctgcaggggtgcgggagcctcctctggcctggtgcgccccgcttctcacggtggggctcctgatgctcacgcctgtccctgcttctccccagaaggcgccatcagcctccgactccgactccaaggccgattcggacggggccaagcctgagccggtggccatggcgcggtcggcgtcctcctcctcctcttcctcctcctcctccgactccgatgtgtctgtgaagaagcctccgaggggcaggaagccaggtagggccctcgtgctcgcacatctcttggcctggcccctgccggggcgctcccaggcagtcccctggtcaccttggagccctggaagggaaggtcaccccctcctcctcttcctgtagcggagaagcctctcccgaagccgcgagggcggaaaccgaagcctgaacggcctccgtccagctccagcagtgacaggtgggtgctggggctggggtcccctctggcggctcctccatcggctgaggggcagggcgggctcctgagggaggaacggaggtccccaaccgccccctccgcctccagtgacagcgacgaggtggaccgcatcagtgagtggaagcggcgggacgaggcgcggaggcgcgagctggaggcccggcggcggcgagagcaggaggaggagctgcggcgcctgcgggagcaggagaaggaggagaaggagcggaggcgcgagcgggccgaccgcggggaggctgagcggggcagcggcggcagcagcggggacgagctcagggaggacgatgagcccgtcaagaagcggggacgcaagggccggggccggggtcccccgtcctcctctgactccgagcccgaggccgagctggagagagaggtgagccgggagggcgccgggagtccctgccttcactccacacgtttatggagcatctactaggtaggaggcagtatcccaggttccgggacccatcaagaaagcagtgcgtgggcccagaaactcctgccctggaggaggggacattcatgggagggagggggccgggcttggtggctcacgcctgttatcccagcactttgggcagctgaagtgggacgattacttgagtccagctcgagaccagcctgggcaagatagagagaccctgtctctataaaaaccttaaaaaattagctgggcgtggtggtgtgcgcctgtatagtcccggctgctcaggaggctgaggcaggaggattgcttgagcccaggagttggaggctgcagtgagctgtcatcaatccactgcactccagcctgggccacacagcaagaccctgtctcaaaacaaaacaaaggagggaggagctgtacagatgacatgagggtagtgcgtgctgtccggagttttcggtgctaaggagaagagtaaagtggggtggggggtttctcttttaaatagagtagaccctgaaggtgtgagtagactccaaaggcttgcgtttgggtttaagtaaaaggctccgaatgggctgggcgcagtggctcacgcctgtaatcccagcactctgggaggccaaggcgggtggatcacgaggtgaggagatcaagaccagcctggctaacacggtgaaaccctgtctctactaaaaatacaaaaaaattagccaggcgttgtggcaggtgcctgtagtcccagctactcaggaggctgaggcaggagaatggtgtgaacctgggaggcagaggttgcagcgagccaagattgtgccactgcactccagcctgggccagagcgagactccatctcaaaaaaaaaaaaaaaaaaaaaaaataggctccgaatgaagggaggggatctacgaagactcctgggaggggatacattctaggcaggagaagcagctcacacacaggcccagaggactgcgcctggcgtgctggaggaacagcgaggtggcctctggggctggagtggagggaggaggggagagagggaaaaggagggcggtggggaacggacagagcaggccgggtagggccatgtgggctgcagggaggatttgggctttgaccctgagggaggtgggagccatggagggcactggacagggtagggacaggccctcactcgggtgctctcgggtgccctctggctgccatggggtacagcttgcaggtgagcgtgggagcaggtaggaggcctcctagggtggtgactgtcaggactctcctataccacgtgtggtgctgcgggccctgtcacgccctctacccttgtggagattcaggcaatgtggcctgaatccagagtctcacctagactgagtgcctggggcccacgtgctggtgcccctcagccaggcctgccttctttggggaaagcacgaacagcgccgtgttctctctctgtcactcccttcatcacagaaagggcaccgaactcctggtgcaggaggcgtttcagccacagcccaggactgctgggcaggaggagtgaagggggctgttcctccactgaatggggcctgggctccaagaaccccacgatccactcaggaccggacactgggtcctccctcctctcccatcctgccccagcaccttcaaacagtgtggagggcgacagaaagggtcgagctgcatctcctggtagtgggatgggctaggggtctgggtaatcccctcttcccactgctccagcgcgcccttcctgactgctataggccaagaaatcagcgaagaagccgcagtcctcaagcacagagcccgccaggaaacctggccagaaggagaagagagtgcggcccgaggagaagcaacaagccaagtgagccctgctctgcccctccacaccctgggggccccgcaccccgcatcaccccacaaccctcacccctcacaggggcagccccacctctgagttcagccttggagccggacccggttgaagttcctggtccttgggttgtgtgggctgcgtaggaatcgctgctgcgggagtgggatctttgcccagcccaggggtctcctccagggcgatcccgcctccagagacacggccacgtccggggacatctgtggttgtcatgactggggggtgctcctggcatggagcgggtggaggctggggacgctgctgagggccctgtagtgcccaggatgacccatcccagagaacagtccatccccaatgtccacaagcagaggaggagggagaaactgcaccccggcctaggggtttgcatcttggtccccctgtggtgggcagacagagcctgtctcccagctcacttttttttttttttttgagatggagtcttgttcttgctcttttgcacaggctggagtgcaatggcgtgatctcagctcactgcaacctccgcctcccgggttcaagcgattctcctgcctcagccctcccgagtagctgggattacaggcacccgccaccacgcctggctaatttttgttgctttagtagacacggggtttcatcatgttggccaggctggtctcgatctcctgaccccgtgatctgcccgcctcagcctcccaaagtgctgggattacaagtgtgagccaccgtgcctggctgcagcccacgtttttgtttttgtttttgtttttttttgagacagagtcttgggcttgctctgtggcccaggctggagtgcagtggcgccatctcagctcactgcaacctctgcctcctgggttcaagcgattttcctagctcagcctccaaagtagctgggactacaggtgtgtgccaccacacccggctaattttttgtatttttagtagagacggg[147 bp omitted]cccatgagaattcggcaggccggtatggcagtggcggggtacagagcagcacatggcaccgagcctcagcaatgggcctctctcctgcacgcgtgtcacccttgagggccttttcctagctcgctgactctggtagacaaagccagcccttggccatgtgaacgaggaaaagaatcctgggatttcatgagaactcgggaaaaggcttgtatctttgggcagctcgagcctgtggctgccctggtctgccctaggcctaggctgtggcagggcctccccgcctcccgtttcccggcttagctcccagggcctcccaaaggtttcctttgcagtgggtttgggtccaccccttcaggcgccagcccctcagtggcagagtgccggtgacggggcccgactgaggggagcacttctccacaggcccgtgaaggtggagcggacccggaagcggtccgagggcttctcgatggacaggaaggtagagaagaagaaaggtgaggcctggctgcccagcactgcccacactgagttcactgaggggaacggggacagccgtggcgtggctggcctgtcccgcctgtccctagagagggtgctcagcacatcctcggccggcctggccggcggtgcctccaggggtgggggctgagcctgcagacctggggcccccatgacaaatcctccagaggctctcaggctcctgcccttgaacagctggccccctgtggccctgcctgggcccacacggtgctctctctcctggcccagagccctccgtggaggagaagctgcagaagctgcacagtgagatcaagtttgccctaaaggtcgacagcccggtaagaccctcagggcctgtgagccaagcagtccccgctgccacctccctgccaggctcccttagatgtctcgggaaactgaggcaaagccggggtcctgcagttgggtgggccaggagtctgttccggttgctagtgagcgcatggggtctcctggccaagggccctgggggagctggtcctgacatgcagcacccagctttcccggcaggtggtgtgtggaggcccccaggaccaacccccacgtacctgggaccccaagtatctggctatccctggagttccccgtcaactggacgggggctgaggggagctgttctgcagatacagctcccctcaaggagagcccaggatgtcttcctccacccatcggggccctgggacccctggggatcccttggccaggccgtctccctcactcccaccccaccctgcaggacgtgaagaggtgcctgaatgccctagaggagctgggaaccctgcaggtgacctctcagatcctccagaagaacacagacgtggtggccaccttgaagaaggtatggcgggggaatcagaggcgcagggtgcagtcgggggagctgggagcaagtgcctgcccgggagcccaggcccccagcaggttcctgtcgggacagccctgggtcag[137 bp omitted]tggtgaaaccccatctctactaaagatacaaaaattagccaggtgtggtggcgcacgcctgtaatcccagctactcaggaggctgaggcaggagaatcgcttgaagctgggaggcggaggttgcagtgagccgagatcgcgccactgcactctagcctgggtgacagggcgagactctgtctcaaaaaaaaaaaaagaaatgcctgctgcacagagctgtgctcccgggaggggctgcgggaggggcgcattgctggggcgaggggttcagagccggggctagggccgctgcacttgggtgagccaggcctcttctcttggtggccagattcgccgttacaaagcgaacaaggacgtaatggagaaggcagcagaagtctatacccggctcaagtcgcgggtcctcggcccaaagatcgaggcggtgcagaaagtgaacaaggctgggatggagaaggagaaggccgaggagaagctggccggggaggagctggccggggaggaggccccccaggagaaggcggaggacaagcccagcaccggtgaggggcgggtggggtgggccctgtacctcagtctcctcagctgaagaaacagatgctttgcagaacattccagaaggggagtacagctctactctctgccccaaacctgccagagtgtcatgtcctgttggggtctccgtgcagacccggctttaatccctggggcagccagtgaggggcattcaggtcctaccgtgtgccaggcagccagcatgcaggtaacttggggctcacgccagaggggtgacggggacagtgcatgacagcacacgcctccaccgtctcccaccctgggacgcccagagaggggggtggctctgtgcagcgggggcaaagagtgggggcattgttcagagaggcagtcggtggaggctcgggggcggaggcctcaggtgcccttgcttgcctggtgggccgacaggagatgaggtgtgaccctcggggctgctggctgtggggctactgggctgacatggccccattacaggtgctcagagcagccctttggagatgggatgggcgagcttgggatggggctttgcggcccagggggcagccgaaggctagtgtcttttttttcttttttcttttttttctgagatggggtctcgctctgtcccccaggctggagtgcagtggtacaatcacagctcactgcaaccttgacttcctgggcgcaagccatcctccacctcagcctcctgaggagctgggattgtaggcctacaccactatgccctgctaattttttttttttttttttttttttttgagacggagtcttgctctgtcccccaggctggagtgcagtagcgtgatcttggctcactgcaagctccgcctcctgggttcacgccattctcctgcctcagcctcccgaggagctgggactacaggcacccaacaccacaccaggctaatattttgtattttttagtagagatggggttt[141 bp omitted]tgctggcatgttactcaggctggtcttgaactcctgggctcaagtgagcctcacgtctcggcctcccacgtgctgggattgtgagcccccgtgcccgaccttgtcttcctttgtctttcccaggctgctgtgggcttttctcagggctgcccacgttccctcatttcttgggcccccagttctgcaggccagtgtggctcgggctggggctggctgcagcatcccatgtcaggagcttgcagactggacagcaggtgctggggtccaggtggatgggcatgtgtcacccacggcgctcagcttggcccctggtccagtccttgacaggcaagggttctggggtgcccagctggagcccagcagtgtcctgtgacccctctgtcccacccagatctctcagccccagtgaatggcgaggccacatcacagaagggggagagcgcagaggacaaggagcacgaggagggtcgggactcggaggaggggccaaggtgtggctcctctgaagacctgcacgagtgagtgtcccgggccgtggggtttggactcctgagcggcagcggtgtgacgcgcaccctgggtccgagccgctcctcctgtgccagtccctctgggatgggtcccagggatgtcgtccttactcgggcctcccaccttcacagctgaccccagggccccgctggctggcacttccggcggcccctacagagaggcagctccagggctttgagctgcctgcccctggcctcctgggaaggtggcttcttgccgagcctccagggtggcccaggtaggtaggccccgagcacgggcacccggctatctgacggtgcctgtgcccatcactgtgggctgctgtctggtacaaggctcagtggagtcactcacttacccagcagctgccttgtgctatgcctggctggcgccagcgtggggaccctggagatggttgtggtctctagtggcagaagacaggcagataggagggcggcactcgagcctcaggtgccacaacgggggtacactcctcggtgcccatcccacccaaccgccctacaggcagggcaggggcgggagggcatcctcacaccgcctttgctgttcccaccagcagcgtacgggagggtcccgacctggacaggcctgggagcgaccggcaggagcgcgagagggcacggggggactcggaggccctggacgaggagagctgagccgcgggcagccaggcccagcccccgcccgagctcaggctgcccctctccttccccggctcgcaggagagcagagcagagaactgtggggaacgctgtgctgtttgtatttgttcccttgggtttttttttcctgcctaatttctgtgatttccaaccaacatgaaatgactataaatggttttttaatgaaaaaagaaatcacttttattggcttggttttctagcattgctggtgcagtgggggcctgagctggggcgcaggcggcagtgtcactgggcccgtttgggactgggttgagccatcaggccaccgtgagaagcgactaaaaggcactctgggcccagcccaaccctgaaaggccagtggcaggagagctgggcgggagcaagctcttcccaggagacaagagggacaaaccagggcatctaagctgtgctgcctgcgccctgccccgcacccacgaggctggggggtttgatgcttcctgcatctggcagcccagggtccaggcaggtgagcaggtccgatgtggggaggacgagggtccgcgaggctaggctgggagggtggagaccaggccttccctgagagccgctgctagccgacagtggtctccagcgttcagggagcatgggcctcaggggccagcctcgactcaccccagctgtgtcacccacacaccgtgtgactttggacaggttcccctcccactcggggcttctctttcctcctctgcataaggggctgtcacgtgggcacggtcccaagcaagtcaccccgtgctccgaagttgctcattccacagtggcgtctcgtgtttgtcgtcctgcccagcgtagccgagttgcctccgtcccagtaagaattaggctgtggtgtggcgggaagggacttcctgagctgcggccccatgcttggttggctggacgtgagctgcagtcactgtgcctgatttctgcaaatggctgtgtctggcatcctagcctccgatggccatgggtgtcgggctgaggagaaggcttgggaaggctcctgacccgtcccctctcacggcccgtcacctgaggcagtccttgccgtgccagcttccccggttcagagctgagctgaatgccccggcccctcacggcccctggtgcacacggtgacccctggggcccctccacccttcctccccctgggtctggggttcctgggctcgtgtcctaggagagcatggaaaggggacgacaaggttctcttaccgggtgagtggggatatggcttcctggggaggccgggctgaacggctcctccccgctggactgagcgcagccacggcacgtctcacacccgacctgagcctgccagcctccacgacctgggctagcctgagagcacggggcccggcggccgggtccgccaccaccagtgtctctgatgcctgcagcctccccagccccgcttcctctgcagcccggcgcttgggtgggcctgaggacccagggggagtgtgcggcggaggaagggctgtgccataggcacgcagcctctgtggctgttcccagccctgtctgatccctccatagggcacagttccctgcggggaagtcctttgtctgtgttctccaggggcagctgctgggcccagcctccccaggggcctcagagccccaggtgcctggggcaggcctgtggtgggcagctggaggcagcagcagcctgtttgcttgttttttgcaccccccaccccctgcaaactgctcagtctcaagccaggctggtgcaaagccccagctgtggctgctgtggctcctggcagctttgtccccaccgtgaggccaccccgggggtcagcaaaggcagtagcagcctgccttgggatgatgatggcagtgtcgctttttctagtactttctactatgagggaatgtggttcttaagaccctcaaggtgtgtgtgctaaggccggagacccactttcagcatgagaacggagctgcccggagcctgggatgccacagcactgcctgcaccgctgatagctgggggcccgtgctgcaggactggaagagccctgctagatataaaagggttgctagcggggcaaacagatgcccttccaggctgggcacgctgctttttctctttcctaattgcagtgcttgcttggggacttcaagggaaggctcttggctggtggtctgagtgaccccaggctccgagaggggcaggcagcgctggggaggaggtgggagatgcaggcaggcccggagcagggcgtggggtggctcagttaagaaggtcactgcctccgcagcccctcggcgctcagccagctgcagccccaaaggtctagggctttagggaaccgatccaggtttgggggcggggagaaagttctgaggcagctcctccctggacagagcagggcgaccccgcgccgggcctgcaggctcctacagctactgcccgccagcgggcaaggcgaagggccctaccagccagctgagcgggggattgtgctgtaggccctccagcagctgctctaacccctgccaagcctggtgcacaccctcgcggctctgcaccagccgctctgcgggcagctcctctacagagccagctgaggccacgatgccatagagctcacagaggctgtgccgcgcccgccccactggctgctggagctcggcgggcaggccctggaggctggagaccaggccactgtaggccgtgtgcagctgccggagaaggccgcagaccctggacagaaccccggcatcccgctcctgtgggaggaaggcgcaaggtgagtggagacccatgggcggggtggggggaccctagccctgtgccagacccacctcctggacagcagcgtcctccgcactggcacctgagccctggtccagacgtggctgcccttctggagcctgctgggccttttcaatctggagagagagtacagtggggaaatgatggcttcttggcaaatgacctttcacaacccccacctccccctcccccagggacctgggcacattcacagtcctgggagaaaggccacgagttccaagtcagttgtaccacagtgggcgtgttgtcttgcagaaagaggcaatagttcaaacttccccatgaggtcatcagggagtgcacgtaacacagtgtctgtggggtcgtgtcactcctcacccctaaacctgtggctgcccagtacccttaagataaaacccagctcctcaccatggccttggtgggctggcccctgggacacctctggcctcatctcccatggcaccccactgctgtctccactgaggccacactggctccattctgccctccggccactccagcaggcttctgccccagggcctttgcacacactgcccactcagccgggagcctgcttcccgggcccttcacaaggtccgcgttcggcctcagctccaggtgacccttggtgagaccttcctggcccatggtgtggcagccccagtccctcccgtcacatctgcccctctcctcgggagcacagcgtgcggctttggtgttcattgacttggtgtttatccgcccctggcaggggaacactcaggactctgtcctcgttgttgctgtgtccccagcacgtggcacccacgccccaccctgtccacagggccccatcttcctcatcatctcaatggctggtagggatgcggcacgccgtcaaaatatcgactccagactgctgtcgccctcccagccctcgccgcgccagtgctggagacctgaagccagctgcatatgcagacgcgtcccctcggtgcccaccaggcatctcccctcaccctgtccaaggccaggctcctaatatccactctgcaacccgcccggcctcccctcagcccccctgctctccttgtctgctcaggttacaagcctcaggggtctcttggggtcttctctcacctcccacatcggacccgggcagctctgacttcgaaacacccagagcccagctacttctcaccaccacagcgtgactcctgaggcccggcagcacttgcctgggtttacgtcccactgtctcctctggccctcgcccccacccggtggcctgacctcccccatcagagtgatccttttaaatgaaacccaccttggatcaggccgctcctctgcccagagccctccagggctcccaactcccttggggtcgaagcccaggtccggcccaacctgccccatcccctcctcactcggctccagcctcccaggcctccttcctattcctccaacatgccgggacagtcctgccccagggcctttgcacgggccgtgccctccgctcagatcacactcctgcccattctgacgcactccctctctgtcatttagacctgacttcaagtgtcccctcttcagggtgaccagccccagcacagccacttccttatcctggtacatgttccattttccaagcatcatccaacgcgacgccctatatattcatctgtgaattgtcttccccaaccatggcgccccccaccccccaagggcaggcctggatatccagggtcttcagtagcacttaaaggaacaagtgagacatgatgagtcacacaccacatcccatttcccagcccagcatccttcacgtgtggccctgagcaaagctcttctcttcctgtggcctccttctccccttctgaagagtgcctgggctgagttctggcccaggctactttgctgtgaggattcaaaggtgggaaaatgctttgtgatcagccgcttgcagcgtgctgcgagggtgggcccattccttcattcctccatggcgtttacaggaacgccttccaactgcgccattgtaccgcgtgccagaggcacggcagcgactgtgcatctgggggtggccacagtgacatgaggtgtcctgagggtccctaggacagacttgcccttggcactgtggacacgggggctagatggttctctggggtggggccaccctgggcactgcagggtgctgagcagtgtccctactctccaccaggggcttcccccagttgtgacaaccacagatgtccccagacatggactagtgtcccctggaggcaggtcatccacactgagaaccctgggttagaccctcaaactgcggcttgtcacaaaccccggatgttgatggaaaacacagtggcctaggctgcacgccaggaatcctgaccgagggcggcatctcaaggtttctcacggcccgccggggtgggactgctgtccaccaacatgtaaaacctgtgactgctgggcacggtggctcacgcctgtcatcccagcactttgggaggccaaggcaagaggatcgcgggagcgcagaagctcaagaccagcctgggctacatagggaggccccatctctacaaaaaatttaaccaggtttggtagtgtgcacccagaggctgaggcaggaggatcacttgaacccaggagtttaagaccagcctgggcaacatagcaaaatctaatctctactaaaaatacaacaacaaatactaagctgggcgtggtggtgcatgccagttgtccagctgcttgggaggctgaggtgggaggatctcttgaccccagtaggttgaagctgcagtgggccatgatcaagccactgtagtccagcctgggtggcagagcaagaccctgtctcactgtctccaaaacataaacccctagagcagtcctgtgagatttctgcctcccgggctgcacaacagcttctagaggaaatgttggccctcaggactggggacggggagactggaggccagggacgctgctcagctccctgcagggaccaggatgatcccaccccagagcacgatccggccccaacgtccacattgccaaaggggagaacctaggccagaggaagagagcggggccagtgggaggggtggacgactctggccagggtgcatgacccctggatgcatccgagtcatgttgcgttgggtcctttcctgcgtgcgttgcagccccaggccctgcgggctccctggatcccatcctggcttcactttacccagccacagcgccgcctttccattccccgaacacacccagcttgctccccggtagcttgctgtcctgtccctgcttttgggggctttgcagagctgtctccccatcggtcaggacagggcccagagggacggccttcctgcccagcccacatccccctctgcacacagattgttttgctgtctttgtgtccccaccgtctttatttttttgagacagagtcttgctctgtcgcccaggctggagtgcagtggcaccatcttggctcactgcaacctccgcctcccgggttcaacctcgcctcccagattctcctgcctcagcctcccaagtagctgggattacaggcgcctgccaccactcccagccaatttttgtatttttagtagagacggggtttctctgtgttggtcaggctggtctcgaactcctgacctcaagtgacccacccgcctcggcctcccaaattgctggggttacaggcgtgagccaccgcacccagcctacccgctgtctttaaggatctgatctagctccgtcccccttgccaggaggcaagccccatgagtacagagccatgaccattggtgacgctgacagcatcatctcctaggtgctcagtcagtatctgcagctgggtgagtcctgggcaggggttctaagaagtgccctggggacggggcagcagcagggggaagctcttaccagcctgaagcagtcctggagctgggccagagtgtccctggcttggaactggccgtgctgcaggtggctcaccgcgtgttcaaatgcccgctggcggaagctgggacccaggtcacctaaacgaacgaagtagctcccctgttccgccgacagcacctttggcccaggctgggaggcagccagctgagctggaaaggaaggcgcaccgctcagtcccggaagcccctcagggcatcagggctttataaaagtcaagtgagggccgggc[137 bp omitted]tggtggcgggtgcctgtagtcccagctactcgggaggctgaggcaggagaatggcgtgaacccgggaggcggagcttgcagtgagccgagatggagccactgcactccagcctgggtaagagtgcgagactccgtctcaaaaaaaaaaaaaaagttaagtgaggccaggcgcggtggctcacgcccgtaatcacagcacattgggaggccaaggcgggtggatcacctgggatcaggagctcgagaccagcctggccaacatggtgaaaccttatctctactaaaaatataaaataataataattagccgggtgtggtggcgggcgcctataatcgcagctactcgggaggctgagcaggagaattgcttgaacccaggaagtgtggaggttgcagtgtgctgacactgccactggactccagcctgggcgacaagagtgagactctgcctcaaaaataaataagtaaaaataaaagtcaaatgaagctgggtatggtggctcatgcctgtaatcccagcactttgggaggctgaggctggaggatcacttgaacccaggagtttgagaccagcctgggcaacatagagagacaaaaaacatacaaaaaaatacatagccgggcatggtggtcctagctacttgaggctggagcaggaggatcacttgagcccgagagattgaggctgtagtgaacgcaccactgcactccagtgtgggtgacagagcaagaccttgtctctaaaaaaatgaaaaagggccaggtgctctcacgtgtaatcccaacactttgggaggctgaggcaggaggatcgtttgagcccacaagcttgagaccagcctgggcaacacagggagacccccatctgaaacaaaccaaataaatacatttttaaaaaaaaagtcaagggcccagctgggcgtggtggctcacgcctgcaatctcagcacttgggaagctgaggcgggcggatcacgaggtcaagagatcgagaccatcctggctaacacggtgaaaccctgtctctactaaaaatacaaaaaattagccgggtgtggtggtgggcgcctgtagtcccagctgtttgggaggctgaggcaggaggatggcgtgaacccgggaggcggagcttgcagtgaaccgagatcacgccactgcactccagcctgggcaacagagcacgactctgtctcaaaaaaaaaaacaaaacagtcaaggacctgctagcagctgtgcctgcctcagggacccatgaacccaggcgtcccctcaccttgctcctccgcattcatggggtggaagatgtcccccagcccctccaactcattctgcagcattgccaagcgtggggcttcttcggggccgtgtgtggtggccaaaagccccgtgtcctccctgcctggggcggccccttgggtgaacgtcgccacgtcagtcgcaaggcccttggtagtggctgcggcttcccaggcaggctccgggcctacactgagcacatccgggggcgtggagatgccagagaacggggcctcttgggggctcagggcagtctgctccccaccattgtctgtggtcctggaactggtgagtccaccccaggaggtggcgggggtactaggtaaccagttctggaaggtgctgaggccagtgtgggtggcccctgtcgccacgttccctgaccccatgagcccagcggacactgcgtctttggttccggtcagcactgtcttggtggtgtccaggcccccctggacggcccctttggccatgctcatggcaccggtaaccccactgaagacagtgtccttggtacccataagcacagccttggaggcgtccacgccggtctgcacggttcctttggccacattcactgcccccgtgactccagtagtcactgcatccttagcgccactcagcaccgtcttggctgtgtccacacctgtctggacggtccctttggccacatttacggcaccagtgactccactgcagacggtgtccttggtaccggtcaggacagtcttgctggtgtccacgccggtctggacagtccctttggccaagttcacagcccctgtgagcccagtggacacggcatctttagtgccagtcaggacagactttgtagtgtccaggcccccctggacggcccctttggccactttcgcagcaccggtcaccccactgccaagggtgttctttgtacctgttgcgatattttgggtcgttttcagcccagtttgcacagcacccttggccacgttcgcagcaccggtgaccccactgcagacagtgtccttggtaccggtcagcacggtcttggccgtgtctacacccatctggacggcccccttggccacattcgcagcaccggtcaccccactgcacacagcatccttggtaccagttaacacagtcttggtggtgtccatgccggtctggacagtccctttggccaacttcacagcccctgtgagcccagtggacacagcatctttagtgccagtcaggacagactttgtagtgtccaggcccccttggatggcccctttggccacattcgcagcaccggtcaccccactgcagacggtgtccttggtaccagttaggacagtcttggtggtgtccacactggtctggacagtccctttggcgacattcactgcccccatgagcccagtagtgactgtgtccttggtgccggtcagcacggtcttggccgtgtctacacctgtctgggcagcccctttggccacattcacagcactggtcaccccactgccaaaggtgttctttgtacctgtcgcgatattttgggtcgttttcagcccagtttgcacagcccccttggccacgttcacggcactggtgaccccactgtagatggtgtccttggtaccggttaggacagttttggtggtgtccatgcctgtctggacggtccctttggcgacattcactgcccccacgagcccagtagtcactgtgtccttggtgccggtcagcacggtcttggctgtgtctacacctgtctggacagcccccttggccacattcgctgcccccgtgagcccagtggacatcgtgtcttttgtacctatgaccacagacttggtggtgtccaggcccccctggacggcccctttggccacgttcacagcactggtcaccccactgcagacggtgtccttggtgccggttaggacagtcttggtggtgtctacgccggtctggacggtccctttggccacgttcacagcccctgtgagcccagtggacacagcatctttagtgccagtcaggacagactttgtagtgtccaggccgccctggacggcccctttggccacattcgcagcaccggtgaccccactgcagacagtgtccttggtaccagttagaacgatcttggtggtgtccacgcctgtctggatggttcctctggccaaattcatggcaccagtcaccccactgcagacggtgtcctttgtacctgttgcgatattttgggttgtgttcagcccagtttgcatggcccccttggccacattcgctgcccctgtgagcccagtggacatcgtgtctttcgtacccatgaccatagacttggtggtatccaggcccccctggatggcctctttggccaagttcacggcaccggtcaccccactgcagacagtgttcttggtgccagttaggacagtcttggtggtgtccacgccggtctggatggttcctttggccacattcatggcaccagtcaccccactacagacggtgtccttggtacctgttaggacagtcttactggtgtccacgccggtctggatggttcctttggccacattcatggcaccagtcaccccactacagacggtgtccttggtacctgttaggacagtcttactggtgtccacgccggtctggatggttcctttggccacattcatggcaccagtcaccccactacagacggtgtccttggtacctgttaggacagtcttactggtgtccacaccggtctgaatgcttcctctggccacattcactgcccctgtgagcccagtggacacagcatctttggtgccggtcagcacagccttggaggtttccacgccagtctggacagtccctttggccaagttcactgcccccatgaccccagtagtcactgtgtctttggtgccggtcagcacagtcttggtggtgtccacaccggcctgtacggtccctttggccacattcactgcccccgtgagcccagtggacaccgtgtccttggtgccggtgaggacagccttcgaggtgtccagacccccttggacggcccccttagccatgtccatggcccctgtgaccccgctggacaccacctccttggtgcccgtaagtgcagaccgagtggtgtccaggcctccctggaccactcccttagccacgtccaccacgctggccaccccggaggacacggcatccttggccctggacatcttggaacacaccaggtctttggccccggacaccatctgctgagaaaggacacaggtggatcaagagaaggactgagaggtgtactccaccccgatgtctgccagcccagccccctagtgtgctttggggcaaggaactgcaggcacccagaggccccacctcctcaaaaagcaagctgcttcctcctcaccccgaccccggtcagccagacattcatcgggctgtggtgtggcaccctggctctccgggatgaagtcctcatgagctcacagcgccagcctcttccattctcacgcaccccctttcccggctgcaggcaggcctcgtccatgacagcatgtcctaggcttggactcagccagggtccccaggcctggactcaacgcaggtcctacagttacatttctgttcctcttgcttattctccattcatggcaaatgttgagcctggcgtcccagggacaccagggagactaaattgcttattaaaatcattatatccaggctgggtgtgatggctgatgcctgcaatcctagcatgttgggaggccaaggtgggaggatcacttgagcccaggagtttaagatcaacctgggcaaccaaacaagacccagtctctacaaaattttaacaactggctgggcggggggcacacctgtagtcccagctatttgggaggctgaggtgggaggattgcttgagcccaggaggttgaggcaatagtgagatatgatcgtaccactg[177 bp omitted]tggtggtgggcgcctgtagtcccagctactcgggaggctgaggcaggagaatggcatgaacccgggaaggcggagcttgcagtgagccgagatcgcgccactgcactccagcctgggtgaaagagcgaaactctgtctcaaataataatgataatgataataataataatatattcaggctgggcacagtggctcatgcctataatcccagcactatgggtggctaaggcaggaggattgcttgagcccacgagtttaagagca[144 bp omitted]gaaaccctgtctctactaaaaatacaaaaattagccaggcatggtggcaggcacctgtaatcccagctactctggaggctgaggcaggagaatcgcttgaacccaggaggcagagattgcagtgagccgagatcgtgccattgccctccagcctgggtgacagagcgagactgtctcaaaagataaaaaaaaattaaaaaacacaaaaatgaatgaagatgatgatggcctaggagttctaactctcgggtgtacctgtgaggtgctactttttttgtttgtttgttttttgaaacagagtctcactctgtcacccagactggagtgcagtggcgagatctcggctcactgcagtctccgcctcctgggttcagtaatttttctgcctcagcctcctgagtagctggtattacaggcgtgcaccaccatgcccagctaatttttgtatttttagtagagatgaggtttcaccatgttggccaggctggtctcaaactcctgagctcaactgatctgcctgcctcagcctcccaaagtgttgggattacaggtgtgaaccaccgtgcccggccaaggtgctattttaattcagtagttttcaactgggtgattctgcccccagggggcactgggtgatgtctggagacatctgtagttgtcacaacttggggaggctcctggcatggagtaggtggagaccagggatgctgctcggcaccctgcagtgcccaggatggccccaccccagagaatgatccaaccccaaatatccacagtactgaggttgagaagcccggaaattgtattctcagaacacatctcccagctttggctcaggtgggcaccttgggccctgtagttggagagacccaggttcaagtcccagctttttaccctctcctgctcccgacactcgctgtgtggccttaggcaagccacatgccctctctgagctaatatcctcatctggaaaatgctgattaaaacagatcctcttgccaggcgcagtggctaatgcctgtaatcccagcactttgggaggctgaggtgggtggatcacttgaggtcaggagttggagaccagcctggtgaaaccaacatggtgaaaccccgtatctactaaaaatacaaaaattagctgggcatggcggtgagcacttgtagtcccagctactcaggaggttgaggcaggagaatcgcttgaacctgggaggcagaggttgcagtgaactgagattgtgccactgcactccagcctgggtgaaacagcaaaactgcatctcaaaaaataaaagtagaagaaataaagtgcttacgctgctgtcgctttggtctcatcttgccaggcacagccctgtgtagactggaaccttacgtgattagagtggggtagcactgcacccatttcacagatgtggaaatagaggctcagaggggaagctccgcctgggatccccaggctgtctgccttccctcaggcccacagcagccccccagatagcaggaactgaaatgtcccaggagggagcagccccccagatagcaggaactgaaatgtcgcaggagggggcacccccagggctcctgccacatcagaccctgccctgcacatcctctcaccttttccgaaggttgcagctccttctccgtccatggggccgtctgctctgggtgggcagccactgtggggacaggggccggtcagggagagtgagggatgcagttagaaccatctacccggctgcccattgcacaatagccaggcacagcctaaaaggtcaggaatgtttcagctaccccgccagggacagcaggaggtgacatccacggctaccagccagacctggtcaccccccaaccccgctgggggctccccccaagcccagggccgctgttccctgaagtagggctctgtggaacttcctctgctgggtggacacccaccctgagtcccggggttcatatagcctggcatgggggaacagccccttgcccagcccgccccgcccccaccgcagctgcctgctgcctattgccaggccaaggcatgtggagcagaagtcagctgcctggggctctgggcccagagggaggcccagctcaggcggctgccccaaccctgggttccctgtcaccgtccctgatcgcccaagctgagccacaggaggctggggagcccctgggctgtgtgaccccaggggagctgttgctcctccctgggagtctggatctcactctgatgagctcagatgggcagagcacccagcctgggccatggtgcatcagaaacggagtgcagggtgggggaacggccgagggactgagtgggggggcattgcagggagacaggctgggttgaaagccaccttcggccactcaccccccatatttatgcctcagtttccccatccaccacaagatgtcctagtgtctgatgagagcacacagacaaatatggaggactccccaaatggctggaagtccctgcccggggagctccttctcccaggtccatgtgtagagtccccccacgcccccagctgggccagccactcaccctgagcctgtggttgggcagcctcggcagcaggcgctcctgtggggtcagcggccggccgggctctcgccgagctatgtgcgttggccaccaggttccgggcagagctgaagccaggcagggacccaaagaagctgcccagggtctgcatgggggcggggggtgtgcaggatgagcaggccaagcctcggcaggaacgggtcagaggaagcatcgattgatcagcccaatgccgccccggccccttgctcctgggtgacctcaggaaagtgtttcagccactcagcctcaatttccacacctgggcaatgggcagactcagcctgcctcccatgcacagaggaaaagatcgtctacccgatctccaaagaccttttccttccaggatccccactgcacagatggggaaactgaggctcagagaggggcggagctgaggccggcccaaggtcacttgctggggaaggtgtcgaggtctgcgtgggtcccccgcctccagcttgggtcagaaaggaagggattggcatcatggctcccagaccgcccccaccagcccaccagggaagcacctctccagattcgagaccccaggactgtggaggtcaccttccccggctctggggcatctccaggccccagcaagaatctgccccatttcccctctttaccttgcccttcggtttggggggatcccgtctcccttcgtctggagcagacatagtgagaacgtgagaagctggaagggggcagagaaggtgcgtgaatgggggttccctagcctcccatcccacacccactccccactgaaagcctgagcagcccgacacccacctgcaggcctggcctcaccctggtgtcaccgaagcagacgcggccccgctcacctggactgcgcggggtcccctggaggacggaccggcccggctggcagctggctctaccctcagctccctggccttatagggtccggggcaggcgcaggcccagccagcagcggcaggcggccaatgggcccgggggaggtggcctggacggtcacatggctacctgcccagcccagcatgggcccaggcccagcacctttcccctgtttcctgcccacagcttgcatcaggctgagtggctcacaggccagatgggctcccctcccgggcccctgagcctccagttccatccacgaggtgggtgtagttcaaatctctgctgcaccaggatgccttggccagttaccatctttttgcttcaggtttctctctcgtactccgcaccacgtcccgtaacatccagcttcttctctgctctcatctcccccagcttcctccttcgcttgcttcatcccagccacacaggcctcctcgctatgcctccagcgcacctggcacggtcctgccttagggcctctgcacgggctgtgccctctgcctggaacaccttccctgcaggttcccacagggcaccctcttccgcccacagaacagtgcctggcatacatttggcgcttaatacacgtttggctcaatggagcaacacagagagtggttgtgagcctctgtgagatgaggtcatgcactgaacaaatgctgccttcgcgttacccaggcagaagcggggtctcggggtctcggcaaggagcagggggtgtcctcagtgtggaggggagcccatcactctccggaagggacttgggccaaaacgcagaccaagatggagcaccagccaagctgggggcaccctaggagtggaaacccagcctggggggcttgggccaacccagggaggctccctggaggaggcgtcctgttccagaagtggtgaggatgggattcaaacccagaccctcctgttccaggaagtggtgaggacgggattcaaacccagacccaggaccttcgtgctgagcccagcctatgtgctgggctgtctgtgggtgggtgggcagaggaatggccgtaacgcccaccctgggctgtgtccccctcctacctgcccctgagacagggttcctagccctgtgttattgggggtgagagggcagaccccatgggtggctctgggcactgggctgggaggagggagggtacagccacaggatctgatgattcccaggccgtctgtctccttggagccgacactgtgtttgccaaacagtgggggaacagaagggggggtgtcccccaacctcttctaccagccagtgcttcccaagggtggctgggagagctctgggtgcccctccccttcccaaagggcagccacagcccagtgtgtggagagaaaaaattaaaaagtgatcataaacatcccagccaggatctacccctcctctgcccagcaccctccatggctcccaccttctccggggtgggagcccagggtcaaagcccaagtccccttcctgcagcccggtaggccctgcataacctgcctcgtctgctccccaccttcctctccttcttctcttcactctgctccagccacacgggccttttcactgttcccataacatgccaggacagagtccctcaaagacacacgtgactgtgcctgcttagccccgcacacccttcctcagggctttcgtgtgggttgttgcttttgcctccagcaccctttcccacatccctcacctccttccaggtctttcctcaaatatcacttcctcaaagaggcattcctggatctcctctccctttaaaaaatatatacctcaggccaggtgccatggctcaccctgtaaccccagcatttagggagaccgaggcaggaggattggcttgagcacaggagtttgagaccagcctgggcgacagagcgccaccccgcctcaaaagaacaaaagaaaaaaaaaaaaaaataaataaaaaaaatatattttatatatatatatttctgttg[131 bp omitted]ccaccacac[136 bp omitted]ggctgcccaaaatatatctttaaataaaaattaaatgaattaatgggccaggcgcggtgactcatgcctgtaatcccagcatcttgggaggccgaggcaggtggatcacctgaggtcagggttcgagaccagcctggccaacatggcaaaaccctatctctactaaaaatacaaaaatcagctgtgtgtggtggcgcacgcctgtaatcccagctactcgggaggctgaggcaggagaatcacttgaacctgggaggtggaggttgcagtgagccaagatcgcgccactgcactccagcctgggtgacagagtgagactccttccccacccccccaaagaaaagaaaagaaaagaaaaatcccagggcttagctcaacccattctcttttcctcacctctgctgcagtgaaactgatttccctactgctgtgcctttccctaagctgttccctctgccaaaatgcctacccctatgtgctgttctgatcatcctcaacaggcctggccctgccaggagcccccagcctcatgtgggaagagagagcaaggctgcctgtggctataaagtcaaggtggaaagggcaagaaaccttgagaaggtggcctgtggaggaccggaggagggaagtatccggctgggatggagtcctggaagccttcctggaggaggaggcattgaggctgggccttgaggatgtatgagatgtgtccgagggacggatggggggtgggaagagtattccaaggtggccgcacagcctcagcaaaggcccggaggtgggaatgtgcccacttcaatggtaagagagcaaagtatccaggtcaggctggaggaggaagctggaaggtgaagagtttggtctgtgggcagtggggacctgtgggagattccagaacaggagcagggaggtagatttggctggtggaagtggtcggagatcccagagctgccctctggactatgtcccagggaagtcaggggccaccctgacctcaccataccaagctgtggtttcccaacaccccgcccagccccaggggagtcggaagagcagccaggaatgcggtcagaggacaggaggaaacccccgagaccagcctatggcccttgccctgcctctgtcttcccatcctggccagtgcagctggagagaccacagcaagaccagctcctgcaggaccaggaggtagagagagagctgccccatctgactccttccccatcttttctgctccctgcaattccatgaaattcacctgtaccaagatgagaacagcttccatgcggccaaaggggcaatgctgttgtttatttttagagacagggtctcactctgttgcccaggctggagtggagtggttactgatccaagctcactgcaacctcaacttcctaggctcaagcgatcctgctgcctcagcctcccgagtagctggggcacaggctcgtaccatgtgtcattttaaaatttttcgtagagacaaggtctcctatgttgcccaggctggtgtcaaaactcccgggctcatgaaatcctcccacctcagcctcccaaagtgctgggattaccgatatgagccatggtgcccggctaattttaagtggtaatgcttaccccacatgggctgggcagtaacggtggatcccagacaggatgacaggcaggtcagagaagcaccattcttctagatcttgaactctggctctacacacccccttctccatgtctcagcagtgacacacctccgtggcccccagccccctgggactgagactcaccctggctggaacacacacgtgggcctttcaacaacaaaaaggacctttattctggaggcaaatcccaaacagcaaagcaagcgagtatggcaggctgagcagcacggcccatgggcagaggagggctcacttttcaaagttccaaatagggcaaaatgtgtgtttccctaggaagtattttttaaaaacatttttgagatagagtcttgctctgtcacccaggcgagagcgcaggggcaagatcatggctcactgcagcctccaactcctgggctcaagcagtcctcccaccttggcctcccaaagtgctgtgataacaggtgtcaaccaccacacccagtcagggctcacttttcaaagccccaaacagaaggcattgggcaaaatgtgtatttcttcgggaggctgttactattattttttgttagatggagtctcgctctgtcacccaggctggtgtgcagtggcgcgatctctgctcactgcaagctccgcgcctctcgggtttaagcaattcttctgcgtcagcctcacaactagctgggactacaggtgcacaccaccacacctggctttttttttttttttctttctttctaagtagagacagggtttcatcatgtt[134 bp omitted]caggacataggtgaagaacccagcttgtggctcaagttggcctgaatagggttcgaggccctgctcccccgggcctctttgtccatgtgttcaaggaaaaaatgggagagtccaataccaaaaaggtggtcagagatccggagttgggcctgattccaaagaagggtcaaggccaaggcctcgagcttacgtgtggccaccagggggcagcagggatcggggtgtgcaggtggcctttcctccccgcctccactggcccatgggtcagaagtccagctcgggcatcagggtgtgcttgaccgggcagctgggggtctcgggttcctgctcgcagatgtccccggcaacacccatcctgtccccatccccattcccactcccgtccctgtgctctgcctcccaggctctctgctgggccggccagtccaggtgcgcccagcgggggtcagggcccccgatgacctcgtccaccaggtccgccaggtcgggcaggggctcgggtcgctccacaaggatgggcgcgaagggtcccaccagccagggcagcggcacggcctgcaccaccagctccagcagctcgtccacgcaggcgtgcgcgtgggccacgcgaccccggccctcggccagcgcggccgctggcacgtccctgaagcagcgggcatcagcgaaggcggtctgcagggcatccacactgcgccgcacctcagccaccttctcctgggcgccggcgggcaggccccgcacgctggactccagagcctctaccgtgccctgcagctcctgggtcaggctgcgggacagcaccagcgtctccagctctgcctgcagggggcggggacctcagtttcccctatggacgcccaggaggactgctgtcctgcctcggtttctctgatggacccacagtggagctgtcaacctgtctcatagacctcatagtcctgtcccctgtagacacagaatg[143 bp omitted]gcgaaaccccgtatctaccaaaaatacaaaaattagctgggcgtggtggtggacacctgtagtcccagctacttaggaggc[136 bp omitted]atggtttctaggctataggttcagggagagaatgtggagggagggaaagcgagaaggggcgggaagccagggactactgcttgcttgggccaacacccccctttccccccacctccctccatctcaaaaataaataaataataaaataataaaactccatctcaaaataaatacataaataaaacacacaatgggacttaaacctgcctcagtttccccccccagacacctcaactagctgagctcagcacttggtttgagatagcttgagttgggtccccggcagtactgggctgacccgcagtccgtcgctccccctcttcctccgcggcctggtggcagacaccacctcacctggcactcctgcggtctcacctggctccggcggcggctctccggagggcgctggccccattccccccacagctcgtgcaccttcccagggcaggccggggcggtgggggtcaccccacactgcatgtggtctatctgcaaggacagaaatggtggtcttcagagctgggggagctgggggagctgggggtcggggtggggtccaggaccactgatctggcctcagtaagcatttaggagaccgaggcaggttgtgcagggccgtggggaagacttgggcttggaccccaagggaggtgggagccatagagggctgtgggtaaagaagggacagacctgactcaggggctcacaggtgccctctggtggctgctgcggggagggaagagctgaggatgggaggattctgatgaggaggaaggctctcttctgacctaccctaacttgctataaattccagcttctccttcccctcttccacaaaacccctccctgactctccaggcagagccatgacatccctgggctcctccaggcccgggtcccccagccctgaacacatgcagctggagacagctgcacccagctccgcctcctgctttaggctagcacgggatccggtattcagctggtgctcaatccatactgattggcctgcatcccggagcaggggcgggcagcgggctctcaccagctccagcgtctcctgcagctgggccagggtgtcctgggcacggtgtttgctctgcctcagtttccccacagagtgctcgtaggccaggtggcggatccgtgctgacagggagccgaggcgcacaaagtagccctgctgtctcctctgatcctccaccgaacccacttcagggccttcagcctcagccgccagtgccgctggaggacaggatacggggacagcacggggacaggatacggggacagcacggggacaggatacggggacagcacggggacaggatacggggacagcacggggacaggatacggggacagcacggggacagcatggggtcagcacagccacccaccccctccacatctgctcacccacctctgggtacagaagccacaggttcccacattcacagttccccttgactgacatcaacccatttggtcttccccaaaccctaagatgtaggcactatggtgggccctgttttacacaggaggaaaactgaggcaaaggagaggtgagatcctgcaggatccaagaagcagacccagattggaacccaggcacgttggtcccaaactgcttaaccattttttttttctttgagatggagtctcgctctgtcccctaggctggagtgcagtggcactatcccagctcactgcaacctctgcctcccaggatcaagcgattctcctgcctca[133 bp omitted]ggcctcctaacgtgctgtgtttacaggtgtgagccatcatgcctggcctgcttaaccattcttttaagcagccttttaaaaatataggttgggtgcagcagcatgcacttgtaatcccagcactttgggaggccgagatgggaggattgcttgagcccagggaggattactttgagactagcttaggcaatacagcaaaaaaccctgtctctaaaaaagaaatacagaaattagccagggctgggcacagtggcgtgtgcctatagtcccagctgcttgagaagctgaggcaggaggatcaattgagctcaggaattgaaggctatggttagctacgatcacaccactgccctctagcctgggcaacagagcaagactccatctcaaaaaaaaattaaaattaaaaaaatgaatgaaaaataataaaaaaagagaaaatccacac[135 bp omitted]agaacaagaccccatctctaagaaaaaaaatttttttttttgagatggagtctcgctctgttgcccaggctggagtgcagtggcgcaatctcggctcactgcaagcttcacctcccaggttcacgccattctcccacctc[211 bp omitted]tggtgtgcacctctagttccatttgtctaggaggatgaggcaggagaatcacttgaacccaggaggcggaggctgcagtgagccaagatcatatcactgcactctagcctgggcgacagagtgagactccacttcaaaaaaaaaaaaaaaaaaaaaaaaaaaacaacaatggttgggcgtggtggactcacgcttgtaatcccagcactttgggaagtcaaggcaggtggctcacctgaggtcaggagtttggccaacatgcaaaaccccatctctactaaatacacaaaaattagccgggtgtagtggtgggtgcctgtaatcccagctacttgggaggctgaggccggagaatcgcttgaacacgggaggcagaggctgtagtgagctgagatcgcaacactgcactccagcctgggcaacaaagtgagagattctgtctcaaaaaaaaagaaaaaaaaattcaggagtgcctggcacacaagaagtgcctgatcaatgcctcactgcctttttttttttttgagatagagtctcgctctgtcacccaggctcaagtgcagtggtgcgatctctgctcactgcaagctccaccccccgggttcacgccattctcctgcctc[174 bp omitted]gcccggccgcctccctgcttttctgctgaggtgggggtaagcccatacattcttccagtactgtaaggccagagttggacattcacatggtctccagggccaggcaggtaccaaaaaccatcaaagtagatatgacataaaccactggggactagtggagctgagcaaaccatctgaaggagcagacaatattctggctgtgtctagtttttctttttttttttttgaaacggagtctcgcactgtggcctgggctggagtgcaatagcgcgatctcagctcattgcaacctccacctcccaggttcaagtgattctcctgcctcagcctcccgagtatctgggaatacaggcacacgccaccacgcctggctaattttttgtatttttagtagagacgggatttcactatgttggccaggctgggctcgaactcctgacctcatgatctgcccaccttggcctcccaaagtgctgagattacaggcgtgagccactgtgcctggcagtgtgtctggtttttcaaaacaagccaagaatcgggacatgtaatgcaaaatctggttgttaaatgcatgcaaagaatgaaaatatttaaaacacgctgcacaggcatttgggggccaccagtttgggacctcaagtctaaaagccctatatgcccttagggtctgggtgttctgactcctggcgggatgcaggttgaggggccgtggaagtgaccgggagggaggacaggcctggttttgagttgtatgtttcctgctgatctgctgtgtgaccttgggtgagtctcagacctctctgatctgtaccacaggggatggggacggggcaggactcaggggttagggttgagggtgtcgtcctcaccgagctcttcctccgtcatgggcaggaagtgatccaccagctcctctgatttttccagtacaacatccacagcatggctcacggagcgcttcagctccacgctccagcgccggcccctccgggccaggtccaccacacccgtgacactgctggccaccacgtccttggctgaggtcaccacctggaaggaagggcccccccactccaggcaccgtgggactccagctccatttctgccaccctagttccctggggctgggactcaaagatccctggacttctacctggctccgtgcctcagtttcccctataaaatgggtgataaaacccttccctcacagagggtgttgagggagttaactgcccttactagcaatacatatgtatacacacatacatatacatatatacacatatacacacatatacatatatacatgtatatatacacatatacatatatacttatacgtatatatacatatatacttatacgtatatatacatatatacactatacgtatatacatatatgtatacacacacacacacacacacacacacacacacacacacacgttgcagttattttaacctggctgttttttcttgagttaactaaaagcctggttgtcaccatccctccctccctcccgcctctaatctggcctgcccccactggaggtccccatgtctagtcgtccggggtaccgtctccgaaggttgctggagaaagggaagcttctcttccagcttgtccaggcccctgcaggcgaggctgttcatagtggccactgaagggagagaggcggggagtgagactcggggagacgcagagggagatagggacgcagtgagagttgtagaaggagggaatgctagagagagaagcagagacagagaaggaaggagaccaggataagacagggagaaacaaaacggaatgatggagacgagacccacaccaggagatggacaggctttctgagaccttacaccaagaagccgcttacaccaaagacgctggggcagacacctgtggcgcctggagagagagtctacgagggagatggggagaaggcctagaccacagggggacctggctgcctccctaggtgagactgggggccctgagggtgtgggtaggccgctgggttgggcactgcctcctctgccatcctgcctgggccctgccacccaccctgttctcccagcaccaaggcgacttttcagccgtgcccagctcagatggcccagcggacagactcaaggtcacagaagctggctgagagggaggtgaggaggtgctgggctaggaccctcaggtgaccctcttcctgggtcagactagaggccaaggatcctgtagtcccccgcctgtcatcggctcaggggtccacagagatgtgagaactacagagcggaggctgcggggcttaggacaggcagaggcaggtgcagaggggagggggcctggagagacaaatggacccaaggcacatcaggccaacaaaggaggggacacagggagacagatggatagggacagagaggaggggccccaccagtaaacaggtaagggcagagggccaggggatcagatttatttatttattttgagacagagtctagctctgtcacccaggctggagtgcagtggtgcgatctcggcttgctgcatcccctgcctcccaggttcaagcgattctcctgcctcagcctcccatgcagctgggattacaggcgccctccaccacgcctggataattttttgtatttttagtagagttggggtttcaccatgttggccaggctgttctcgaactcctgacctcaagtgagtgatctgcctgcctcggactcctaaaatactgggattacaggcatgagccaccgcacctatcaggggatcagttttttttgtttgtttttgcttttttttttttgaaatggagtctcactctgttgcccaggctggagcgcaatggtgcggtcttggctgactgcaacttctgcctcccgggttcaagcaattctcctgcatgagcctcctgagtagctaggattacagttatgtgccaccacaccgggccaagttttgtatttttagtagagacagggtttcactatgttgtccaggctggtcttaaacttctgaccttgtgatccaaccgcctcagcctcacgaagtgctgggattacaggcatgagccaccacacccagccagatttaaaaaaaaaattttttttttgagatacagggtctcgctacgttgctctggctggtcttgaactcctggcctcaagtgatcctccttcctcggcctcccaaagtgctgggatcataggcatgagccaccatgcctggctggtgatcagattaaagaaggacttaagtgaagagattgaggacaggtggcatggcagtgggacaggtggctaggctgaagatgacccccaggagtgtcatgcagatagaccaaggaggatgggacagggggcggtgggggggtggcaagccacagctcccagggacacgggccagggcactcacgctggggctgcaggtgctcgagcagcggctgggcgtggtccagggcacgggtggtcaggccgcacacgcagttctcagccaggcggcaggcggagcccagcagcgggtgcctgtccttggctgcactgtaaacatcgcagaccgcggtgcacgtggccctgaccaggggcagagccaccacacgctgcaccacgttctgcgggaagggtcggcatcagggggaccctgggggaagtggggccctagccacacctcaacctacttcccctctctgggccaggacgagggatgggagagtggaaggatggagtactgagcaccccgccacgtagaggcagtgaagataaacgtggatgtgagaatgtcatggttcctgcactcacaggctcctcttcccatggcgtacacagagcattacaattttgtttgtaatggggtttcactcttatcacccaggctggagtgcagtggcaccatctcggctcacggcaacctcctcctggattcaaacgattctcctgcctcagcctcccaagtagctgggattacaggtgcccgccaccacacctggcaattatattataagagggagtctcgctctatcgcccaggctggagtgcagtggcacgatctcggctcagcgcaacctccgcctcccgggttcaagtgattctcctgcctcagcctcccgaggagctggaattacaggcatgcgccaccatacccgttttttttgtttgttttgtttgtgtatttttagtagagatggggtttctccacattggtcaggctggtctcaaactaccgacctcaggtgatccacctgccttggcctcccaaagtgcagggattacaggcgtgagccaccgcgcccagccaattttgtttttatttttatttttagtagaaacagggtttcactatgttgaccaggctggtgtcgaactcccgacctcaggtgatccacccacctcaggtgatccacccacctcagcctcccaaagtgctaggattacaggcctgagccattgcacctggtcacaatttttttgttttcaatagagacaaggtcttgctctgttggccaggctagagggcagtgattcaagcacggctcactgcagcctaagcctcctagcctcaagcaatcctccaacctcagtttccaagtacctgggattacaggtgcacaccactgtgcccagctaattttattttattttatagagattgggtcttgctgtgttgcccatgctggtcttgaactcctggctcaagcgatcctcccgcttcagtctcctaatatgctgggattataggcatgagccactgcacctggccaaatactatattttttttatctgcatttggttgaaaaaggtctgcatacttctgtctcctgggttcaagagattctcctgcctcagcctcccaattagctgggattccaggcaggcaccaccccacctggcttttttttttttttgagatggagtctcgttcttgttacctaggctggagtgcagtggcgtgatctcggctcactgcaacccccgccttcagggttcaagcggttctcctgcctcaggctcccgagtagctgggaatacaggcacccgccaccacacccggctaattcttgtatttttagtagagacagggtttcaccaagttagccaggctggtctcgaactcctgacctcagttgatctgcccgcttggcctcccaaagtgctgggattacaggcgtctgagccaccgcacccagcctgacctgtgcagttcaaacccatgttgttgaagggtccactgcgatctgtctgctcgagggaggagatgttagagtctgggggttcagagcactgcccctggagcacagtggcctctgttcacttctggttcagctgcctgcaagttgtgtgaacttgggcaagccactgaactgttcggtgcctttgtttccccatctatgaaatgggttactagggttgtgatgggtgttcaaggagccaatatacatgaaacggttggaactgtgactgatacagtgattgctgctcttactattgttgttactgagggcgccatgatggtggacgtggagacagaaggatacaggtggagacccagggatcaaaggagagggaaagggttgggtaggggccacagaagccagctgggtgtctttgagagacactcccctcccagggcctcattaagcccccactaggaaatagaccatcccctccatggaccaaaatattttatgactcaggttttcccagcaaggagaggagtggggcgggatacctggcctgaaacgctcctagaagggactgtcccacacaataccttctgtccctgctccatgggaggggcagccctcacctgctggtcctgctcccacacactggatctggggatctgagccgcctcttcttcagacatcgtgctgcaaacagggtcaccctgcggggcaggattgagtaaggggagcacctgcccaggcatcagatcctgtcaaattgggctctgtgacttgagcaactctcaaacctcttggggcctcagtttcttcatctgcataatggggcattctgtggagctcagacaatgcatgtccagagctctgtacacagagggtgtccaataatgagcctctggcaaggtagggttgccggagtgactcgaagcatggtctctgaggtgagaaagacctgggttcaaatgctaccattaattgcggtgttatttttattatttttttaaagacagaatctctctcgcccaggctggagagcagtggcgccatcccagctcactgcaatttccgcctcccaggttcaagtgattctcctgcttcagcctcccagttagctgggattacccacgtgccaccatgctcggctaatttttgtatttttagtagaaaccgggtttcg[132 bp omitted]ctctctgggctgcttcctgttttgtaagatgtgggaggtccctgctacccctgcggcccctgcctgggcccagaactgcccaagcaccctagacggctggaggtggtagctgctgggtcccagtccactcacagctcatttgacagacagggcaactgaggtacgcagcaggtccatgctggtcccaaggtcacgcagccagctagagttacagggggggagctcgacctcgggcctcagacctgccgcctgcgatccctccggttgccaccccgcgtcctctgaggcctggtcctcgcccaactgggtcctgagctggggccaaccgggccaagggtcccagccacctgctctggccggtcatacccgtcccacgccgccggaccttcgcccaaccaccctatctggagctcctctcctaagcccgggggggcgctcccggacgccgccctcagggcactcacctgggcgcgagcggcttcagacaccagctgtctccgccgaccccaggctcgagtctccacacccccgccggtcccgcccgcccttcttatagctgctcgcgcagtgggggcctccggaactgaccaatggggagaggccgtgcgggggcgtgcccagggggcgtggctccaggcttccctcgccctctccttgagctggcccagtgccctacggttgccatagtaattcgggagcgctagattcaaaagattgagctattatacgttcccggaccaagtttggccacctgtcatcctcactgctgttgccatagagacagtccatgcgatcacagcccccatagccctgctgagtgaccttggccaactcgctgatgacttttcttattaattattattatttatcgatttttgagactgggtcttgctcggttgcccagggctagagtgcagtggtgtgatcatagctcactgcagccttgccctcccaggctgaggtgatcctcccgcctcagtctcctaagtagctgggaccacaggcacacaccaccacccccagctaactttttaaactttttgtagagacgagatgtccctgtgttgaccaggcttgtcttcaacccctgagccccaagtgatccttccacctcagccttccaaattgctgggattacaggtgtgagccattgcacccagcctctttttatttcttaatctgccccttaactaagccagaagccaggccttccctttccctaggatccccatttcacagatgagcaagctgaggctcagagatcataaaacacttgccccgcataccacagcaagtg[136 bp omitted]gcctccggagtagctgggattacaggcgcctgccaccacacctagctaatttttgtatttttagtagagacggggtgtcaccatattcgtcaggctggtcttggactcctgacctcgtgatttgcctgccttggcctcccaaagtactaggattacaggcatgagccaccgtgcccggccagggatcctattcaaacccagccctgctggacctcagaaccctgccttttcattgccttgcctggaatgaccacagatgtaggcatggtctttttatttttatttttatttttgagacacagtttcactctgtcgcccagcctggagtgcagtggcgtgatcttggctcactgcaacctccgcctcccaggttcaagtgattctcctgcctgaccctcccaagtagctggtattacaggcacgtgccactgtgcctggctaatttttgtatttttagtagagacagggttttgccatgttggccagtctggtctcgaactcctgacctccggtgatctgcctgcctcagcctcccaaagtgtttggattacaggcatgagccacggcgccaggctgcatggtcattttttagggagctgggaaaactggacatgcccccaagccccagggtcttccaaatccgattgcagcccccacatggccaatgctgtatcagcaggtgggcccgggaccctgctcatcccttcagccccatcctgcccctgcaaccttgcccgggggcaggtgcccccttcgatgatctcaggtcagcatgacaaatcgtttggagacctgggcaatctggtttaacttaaaccttctcctaggacacaagccctggcagaaatccactggtaaaatgacacccgggcaacagtcaaggttttatttccagttaggtcccaggatgggggaagggagaggagaagtcacaggccattgatcccaactgtcatcccctagggagaccatatcccacaccccagggcctgggccatgcctcttttcctccttcaccctggagtcctgggaagttgatttgagaagatgctaggaacacaatgaaagccaattcatccgatccagttttcaagggttatttattaaaccccttggttctgaccccaagctaagtgggactcagcatcagaccctgcactcagagagccccctgacttggggaagacagagtcagagaaaggcagccccagtgtggccagggctcagctggaaggaaggacaaggggctgggagaacccagagttcaagagatctgggaaacagggaacggcattccagacggagggcacaccttgggcatgggtaaggaaagcccatcgtgtgttctaggaagcatggatggatgaaacggggtcccagccgctatggacagccccgagtttcacctgtaaaaggcaggattatttgtttttaattttaattttaatttttttgagacagtcttgctctgtcgcccaggctagagtgcagtggcacgatcttggctcaccgcaagctccgcctcccaagttcacgccattctcctgcctcagcctcccgagttgctgggactacaggtgcccaccaccacgcctggctaattttttatatttttagtagagacagggtttcacc[135 bp omitted]taccagaccccccaccctcaacccaagcccctggtctcactgggacttggccactgccaggagcgtctggcccttcacggcttcaggcccagcacagcgcgtgtcattctgggaaaacatcttgtctttttgggcctgaagccaacgatagaggtcgctcaggttctggtcacagatccaggggttgccggagatgtcgaagccatcccgcatgtcccagtttggctgccctagggatgcccagagcccctcgggcacgctggccagtgagttattggagaggtccagcatgtccagctgccgcaggccctggaaggcaccggctgccaccctggccagcttgttgccgttcaggaagaggtagcgcaggtccggctgcggcaagaggagatcttttcccagtacttgcaatttgttgccttctagatgtagccgttctaattgcagcggacccctcaggaggtcaggtggcaaggtctccaactggttctccccaaggtcaagggtgcgcaggagggtgaagttggccagcagcccggggggcagtttccggaggcggttcccagacaggtccagatgccccagagctttcaggccgtgtagccacgagacctccaggacctccagctggttttctttcaataccagggtgtccagggtggctgaggcctggaagaggcccgggggcagcccggtcagggcgtttcgggttagatccagcaccctcagctgcggcactggccgcaggaattcgggcgagaggctttccagcccattgctggagaggtgcaattcttggagcttagaggcgccctggaggaggttggctggcaggtgggtcaggttgaagaattccacggccaggtgcacggtgtcggctggcaggtagccggggatttcggcaggtggttgacaggagatggagctgccatggtctgagcggaacacctggcagtctttggggctcagggtgaccccccaggctgaggctgccaacagcagcagcaggaacagagttctagaaacatggggttgaatgccccctgggctgcaggcagtaacagaagatgcttactaaaccacagtgaaaatacactcagctaggtgaaaatacaccagcaaatccgcccacttcttcccatctctgcggctaccagcctggactatgctacctcatctctcacctgtactagggcagttgcttcctcctcctcttccagcttctaccctcacccccgacagctgccagaagtggcccctgttccagggagaattataattctaggaaagttgagtttctgagtgtaactcccgcataatatgaatacacttccccatcaccagcctagcccccatgagctgttaattattcacagtccaacttgctagtttcttctgatctggcttattttctgggtcagtccttgtctccctggctctgtgttttgatgtgaactcctattcatccttcaaagccccagctccaatgccctcttttccatgaagacttctctgctctgggatcctggtctttttgtccactcttgaccaattgggtgcttggaggaagacagacgttcaggttcatgtttttgagacagagtcttgctcagttgcccaggctggagggaactggcatgatcacagctcactgcagcctctgaacatgaaaagtgtgtcctgctttggccaggtctgagggtgggcatttggccttgggaagcggtggtttacacttagcaccacaacccttggaagcctggggcttcccctcctcctccagggcttccctggcccggcagccatcagacatgatctcgacagccttggtcactgtggccccaggcctctaacaagaagcctcccccggctccctgctgcccatgcccacctgggcttctgtaggggtgtgtgtgtgtgtgcacgcgccagtctttctgtcacagataaggttgatctgtgccagccaccaggcctgtatctgctccctgtgacttctatgggttagctggaatgtcctgtatctccgcatggtctggcgttcaaacctgcctaggacaggtagtgtggggacctacctttttggtcgctgtctgctccaagaggacatggtagctctgctcttttgcttctgggttgtcctggcctgcggaggtggccttatacctgcctggactgggggcaggggaaccaaccctggggaagtccccacccccgtccagttcctgataggggctgagcctaagccaggcaggggaaggggaggggtcaggattacaaaattgcttcctggaaattgtttcctgttcaacccctttttgaccctgcttctagaacacaggtttttctttccttgcttcctgatttttggggggcatccaagagtctctctagttgcatcctcacttcccccaacccggagttcaagggtcaaggtttgcaaggcactattcctggagacagggacagctctctgagcaagaggagggatttaccataaacttgagcaacccagaagctcactgaaaagaacaaaaaaactcgtcttgatttcatggtatgttgatattgctttttttaaaagaagtcattttaaaaatacagtccaatagtgagtaatgccaaacgtctctacggtccttagacagtggcttgggaggaaccaaacctggttctgaattccagctctgtcatgaacacctttgctttgtgacctttggcaagtgacttaacttttcttggcctcagtttccccatctatgaagctgaactcaaatctccaagggctccttctgcccttttttctcttcatctgaatctgacatccatgctattgtttccattcttcctcatttcctattaaatgcgtttggaggctacaaatttccctttgagaacagctttggctgcatctcatggacttggctgcagagtgcttgcattcttgttgagttctaaatatttaggtatgatggtgtcacctttatctgcagctatgactattttttttttctttttttttttgagacagagtcttgcactgttgcctaggctggagtgcagtggcgtgatctccactcactgcaagctccgcctcccgggttcacgccattctcccacctcagcctcccgagtagctgggactacaggcatgcaccagcgtgcctggttaatttttatatttttaatagagacaggattttgccatgtggcccaggctggtcttgaactcctgagctcatgtgatccactggcctcggcctcctaaactgctaaaattacaggtgtgagccaccatgccccgtcatttttttttttttttgagacagcattttgctctgttacccagcttggagcagtgtggtgcaatcatagctaactgtagctttgaccatgggtccaaggcctcccaagtagctgggactacgggcacgtgccaccatgcctggctaattttttttgagatggagtctccctctgccacccatgctggagtgcagtgatgcaatttcggctcactgcaagctccacctcctgggttcaaacgattctcctgcctcagcctcccgagtagctgggaatacaggcacatgctaccatgcctggctaatttaaaaaattcttttgtatgttacctaggctggtctcaaactcctgggctcaaggaatcttctcagtctctcaaagtgctggggttatagacgtgagccactgcactccgtcagtcttgtgccctgcccagtctccggagcccagccgttagttggtcttaatcaacatggactgagaggaaggaaggcttgtgaaatgtagtgacacagtaacaaaacgatccattaaaatgaaatgagatcacatccctgcttaaaactctctgatggcttcttgtcccacttaaaacaaaattcataaggctggccaggcgcagtggctcacgcctgtaatcccagcattttgggaggccgaggcaagcggatcacctgagttcaggagttcgagaccagcctgaccaatatgatgaaaccccgtctgtactaaaaatacaaaaattagcggggcgtggtggcgggtgcctgtagtcccagctactggagaggctgagacaggagaattgcttgcacccaggaggcataggttgcagtgagccgagatcgcgccactatactccagcctgggtgacaaagtgagactctgtctcaaaaaaagaaaaagaaaaagaaaaagaaactggctcctatgcagatgaagatggggaccccgaagtctccatgtttccacactcagctccccagatttgttttgacccagccttttttttttttttttttttgagacagcgtctcgctctgtcacccaggctgtagtgcagtggtgtgatctcagctcactgcaacctctgactctcagattcaagctattcttctgcctcagtcggccgagtagctggaattacaggaacccgccaccaagcctggctgattttttgtatttttagtagagacggggttttgccatgttggccaggctagtctcgaactcttgacctcaagtgatctgcacacctcggcctcccaaagtgccgggattacaggcgtgagccaccgcgcccggcctggccttgacttttgagggtgcccccacccgtgccacccccaggaggcagagcagagccagagtcatgggggccggtggttgtaaacagagttttattgatggggagggggctgggggaggcaaactccagagagggcagaggacccagccagccacgtggcatgcatggtcagctggaggtcagaggggggaggtcacaaggggacgggtggcatgggactctctcaccaccctggggccgtatttacagaggggccccacccaccttcgccgccccccaggcccccaagccctttagacagctgctgccgatgtgacttccgggcaggccctcctcgtgtctcctgcctgaaaccccggcattgtccccgcttccctctgcagagtggggggggttcaaactcctaaccggcacctcggagacccccgggccttctggaagccccagcgtcggctcagccaacgcccaggccgctggggccaccacgatcgtcgctcgtggacacacaccctgcacgcgtggcccacttgacacacacgcccacagcagccttcgctggcacgcacacacacgcccacctccccggccccttgcacacgaacacggcacgcacacgcacgcacacccacacacgccaggggcctgggttggggagggacctttccaggggtgggggagggcttaggtctgcagctgtggccccccattccccaccggcgtccaagcctcccctgcctgccgccaccccgagaacggagttgtgcaattggttagaaaaccgcaaaagaaaccaaaactgcaaaaaaaaccaaaacctacgcgcataaggtcaacctcaaatccatagcaaagtcctcccgcccacccacccccaaaccgtctcagcgtcctgcggccccgggtagggggagggcgagctggttgtgcttccttgtggcggagggggccccccactccgcgggtgggtcgcgggggggacttgagcacccactcggagttgccccgggccccggcgttctggcaccgtctctcgctcctggttcccgtggctggcactgccaaggcatcggggggcccccggcctagggcacggggggcgcagtcctgtccgcccccccataggggaggaggtgggccaagtctgtgcccggccgggcgtggcagccgcggtggcggtccccaggccgggcctcgccgctgttgaacgtgtgggtgcggcgcagggtggcggccggaggggcgtgggggcccagtggcctcctcaggctgcccgtcgggggcgggctccagggccgcgggaggccatcggcggctgaggctgggtccaaggggcccgtgggcgcggacaccacccgccggcggtccgggctggcgtggggggtgagcgggaagtcgccgtgggaggcgcggccgggccgggcagcatagaggcggccgtcgggggtcggctccccaggcgcggggggctgctcgggggcccgggcgggcgccagcagcaggagggaggatgaagcggaggccgggagcagggggtggccgtggtcccaggcgcgggggcccagggcgtgggggtgcgggtgcggagtgggcaggcgcttctgcggcagcggcgtctgctcgggcgtgggcagcagccccgagtccaggtcgtggggcccgccctgcagcagcgtggccttggcccagccgttctgcatcaggggcgccagcagggcctccgggggaaccccggcgccaccgccaccgcctccgccccggcccccgggaccctgcgccctgcgctcgcccaggcggctgacgctcagcaccgcctcgcccgccccgtgcgccaggatggcctccttgtccttgcgccgggccagctcccgccgctcacggaggcccacgaaccagcccacgctgaagccggacaccacggctcccaccacgaaggccgccaccgacgacgttaccagcaggttcaccgacaccagccccgcgcggtcctcggagaggctggcccgcaggagtcctggccggggagcacaggggggttagtggggccggcggggtggccctgggcatccctcctacctcctcggggccctctgtcctcttttttattatttttatttttttttatttatttattttttgagaaggagtcttcctttgtgtgccaggctggagtgcagtggggcgatctcgattcactgcaacctccgcctcccatgttcaagtgattctcctgcctcagcctcccgagtagctgggaccacaggtgcccaccaccacgcccggctaatttttgtatttttagtaggatggggtttcaccacgttggccaggctggtctgaactcctgaccttgtgatccgcccacctctgcctcccaaagtgctgggattacaggcataagccaccacgactggccttatttttattattttttaattttttttgtttgtttgttttgagacagtcccccaggctagagtgcagtggtaaagctcactgcaaccctgcctccagctacctgtttgttttattaaagacaggatctgggccaggcatgatggctcacacccataatcctagcattttgtgaggctgaggcaggagatcacctgaggtcagaagtttgagaccagcctggccaacaagtgaaacccatctctactaaaaatacaaattttagccggacatggtggtgtgcgcctgtaatctcagctacttgggaggctgaggcaggagaatcaattgaacccgggaggtggaggttgcagtgagctgagatcacactactgcactccagcctgggtgacagagcaagactctgtctcaaaaaaaaaaaaaaaagacatgttctcactctgttgcccaagctggagtacagtggcctgatcacagctcattgcagcctccacctccctgggctcaagcgatcctcccgcctcagcctcccaagtagctggaactacaggcatgcactgccacgtctggattatttttgggtttttgttttagagacagggtttcactatattccccaggctggtctcaaactcctgacctcaagtgatcgtcctgtcttggcctctcaaaatgctgggattataggcaggagctgccgcgcctggccccttctgtcctgttgaagttggtctgtctgccttctgttgtctcttcgtccttgccaaagcctgcctgtttcttggtgtctctgttcttcccctatctccctccccaataaatgagatgagaccaccccatgcctttcttttctttttttgagacggagtcttgctctgtcgtccaggctggagtgcagtggcgtgatcttggctcactgcaggctctgcctcccggattcacgccattctcctgcctc[224 bp omitted]cccacccacctcccagaggattcgagggtcctccagcctcctccctcccctcccccatggtagtgggggatgggggtcttagcctgccgtccccccaactcacctgtgcagtcccctaagcctgaggtgctggccccggacacgtcctgctcaaaggcggctctaatggggagaggaggcaccgtcagcagaggcccctctcacagtcagagatcagggggatctgggatcatgggcgggtctgacacaccctccacccacctccctctcccgcagtacctggtgcccgggctgaggaagatgcaggagccgtcgggggcccacccgcagtaggggtcctgactgccgatacagttcctagagcagaccagggaccgaatgggacaagtgtccaagtcacttacacaaccccaatggtgatggtgacctgtgggccctgttccaagcacctgcctctttatttttattttaattaattaatttttgagacggaatttcgctcttgttgtttatttatttagttatttttgagatggaatttcgctcttgtcgcccaggctggagtgcagtggcgggattttggttcactgcaacctccgcctcccgggttcaagcgattctcctgcctcagccccccgagtagctgggattacaggcacgcgccaccatacttagctaatttttgcatttttatcagagacagggtttcaccaggttggtcttgaactcctgacctcaagtgatccacccgcctcggactcccaaagtggtgggattacaggtgtgagccaccacggctggcgttttcttattttaaaattaaaaaaatttttttaaattaaaatttaattttttttttctttaagagacagggtcatgctctgtcacccaggctggagtacagtgtcatgatcatagttcactgcagcctcaacctcccaggctcaagtgatcctcctgcctcagctttctgggtagctgggaccacaggtgtgtgccaccacgcccagctgatttttgcattttttttttttttagagacaggctctcactatgctgtgttgcccaggctggtctcgaactcctcggctcaaggagtcctcctgccttggcctcccaagtgctgggatgacagacgtgagctaccaagcccagtccctcttcttaatagcaacttctggagtccttagaacaaatctgtgtgcagggcactgttcactccccactttacagataagcaaactgacgctccagaaagtaaatgtttgcccaagtggcagagctgagatgggagcccaggcatcgtgccagaggctgtgcccttggactcggagctactgggtcattgttgcaataacggcgggcaggaagcagggtcctccgcattgacggctcacatggagtgcaggcgtgtgccagcactggcatgcatcctagctttcctcccattttagagacggggaaacagcctccaccctggtccctggttctccttcccctgcagtctcctcctggcagcagccaccagagggcacctgtaagcacctgagtcagggccagtccctcctctgcctgcaaccctacatggctcccatctccttcaaggtcaaagcccaagtcctccccgaggctcacaaagctctgcacaaactgcctcgtcctctcccatcccctccccgtcctcccctcctccctcactcccccttgctcactgtgctccagccacaccggccaccttgctgttcttccaacacaccaggagtggtcctgcccgcgggcctttgcacgggccatgccctctgcccagctcaatgaccaggacatcattgggcttttgactggaacccagctgtccctccctgtgcccatcctcccttgcttcccgcccacggctggcctggggtggacactcacttcatacaccccgagtactgctggcagcgagccacaggcactcggaccacgcagcgggggaaggcagccagcaggccccccgaagctgcgtccagctccaagctcagcagccgctgccctgtctcgccaccgccgggccgtccacacctggggacaagcagagtggtgaggctgagcgcatctcagcccatctcccctcctgctggcgaccccttcccacctttgcccagacttacctgtccggccggtaggtctcaaactcctccaggaagacactgagcccagacgtccctgaggtgctggcattgggccggacgaggaacttgaggaccgtccccgcctcagaacccaggaagacaacggtctggttgccccaggggccggctcccacgtccacagccactcgagtcagctggtgcctgggggacagggcaggggagggtcaggctggccccatatcaccacatgccaccaacacgggcatggccatagttacacgggtgcatacagacactgacacaccaacacatgtgacagcaataaatgcgtgtgtgcatggatgccggggacatgcgtgactacacaggcacgtgggcacactcgcccttttttgaaacataaccccaaaccaggctctcctcagccctgtctctttggttgagatggagtctcactctgtcacccaggctggagtgcagtggcgcaatctcagctcattgcaacctccgcctcccgggttcaagcaattctcttgcctcagcctcctgagtagcagggactacaggcacacgccatcacgcctggcaagtttatgttttgttttttttgagacagagtctcactctgttgcccaggctgcagtgtagtggctcgatctcgcctcctgggttcaagcgattctcctgcctcagcctcccaagtagctgggactacaggcgcacaccaccacaccgagctgattttcttttttttgtatttttagtagagacagggtttcaccatttggccaggctggtttcaaactcctgacctcaagtgatcctcccgtcttagcctctcaaagtgctgggattacaggcatgagccactgtgcccagccccgctttctcctgatatgtatgtgtgtctgtgtatctttcagtctctttctctctttgtctctcttccctatctctgtctctctgggtgtctgtctgtctctgattgtctctctccctgtctctctgtctctttccccctttgttctcctggtgtgtgtctgtctgtctacctctttttttttttttttttttttgaggtgtagtctccctctggccccaggttggagtgcagtggcgtgatctcggctcactgcaacctccgcctcccgggttcaagtgattctcctgcctcagcctcccgagtagctgggactacaggcgcccaccaccacgcctggctaatttttgtattttattttattttatttttgagacggagtttcgctctttcgcccaggcgggactgcagtggcgtgatcttggctcactgcaagctccgcctcccgggttcatgccattctcctgcctc[222 bp omitted]ggccagggtggtctcgaattcctggccttaggtgatctggcagcctcggcctcccaaagtgctgggattacaagcatgagccaccgtgcccagccccatctgtcacctcttgatccctctgtctctctctttgttctctctttcctagtgtctctccatctttccctctctgtctctctgtgtctccagctctctgggcagcgccggaagccatgggctcatctgtgttgagcatctggatcctctcaccctccatctaccccatcctgtctcccctcgccatgccctgcctctccaggaccgacctcatcagggtccgcaggatccagggcgcatggcccagcgagggcaccgcctcgtccatcagagggtgggtcttgacaaagttgaggatgtcatccggcaaggcgctggaggcattgtactgcatcccgggggctgcgcagcacccgggcctgggggtgacaagggtgtggtcaggacgaacgtaaaggttctcataaaggggcctgattcaccagaggtacccattgctttgcccaacgaccctcaggttttttgtttgttttgtttttgagacagagtctcaatctgtcgcccaggctggagtgctttggctcactgcaacctccacctcctgggttcaagcgattctcctgcttcagccacccgagtggctgggattacaggcacgtgccatcacgcccggctaatttttgtatttttagtagagacagggtttcgccatgttggtcgggctggtctcaaaccctcgacctcaggtgatctgcccacctccgcctcccaaagggctaggattacaggcgtgagccaccacaccaggcctcagtttttcccaactgtataacgggtacagctgaactcagcatcagctaaataaccacccggaagccccagccctcggccctggggatcaggacctcatccgggcatgtgactcaggatggagggggttctcaccggggtcgaggcacctgatcctccggcaccggcgtccagatggactcgggggacttctgctctcggaagcggccttcaaacacagctgccacctgtgtcaggtcaaaggcgcagacagccgagccagggatgctgaggggttgggatgaaagagtttggtgagcccggtgggaggccccatctcggacaagtgcgtgcaggagcctctgtctgcaggagccagtgaatcttcagtcttcctaggccagagatgtcccctgtccctcccgcatctgtcgaatgcagccactcctcctgaataacatctcagattgggccacagttcagggtctacgaggccacccctgtccaggcccccatccctgtttaactggatgtcctgcctgcccagtgtcactgttagagcccactccccagcaggcttttttttttttttttggagaccgagtcttgctctgtcgcccaggctggagtgcagtgacgtgatctcaggtcactgtaacctacacctcccaggttcaagcaattctcctgcctcagtctcccgagtagctggaattacaggtgcccaccaccacacccagctaatttttgtatttttagtagagatggggtttcaccatgttggccaggctggtttcgaactcctgacctcaagtgatctgccctcctcagcctcccaaagtgctgggattacaggcgaagccaccgtgcccagtccacaagcaggctttttaaaaatgcaaaccttggccgggtgcggtggctgacgcctgtaatcccaacactttgggaggctgaggcgggtggatcacgaggtcaggagtttgagtccagcctgaccaaaatggagaaaccccgtctctactaaaaatacaaaataagctgggtgtggtggcgcacgcctgtaatcccagctactagggaggctgaggcaggagaattgcttgaacccaggaggcagaggttgtggtgagccgagatcgcgccactgcactccagcctgggcaacaagagtgaaactgtctcaaaaaaaaaaccaaaccaaacaaacaaacaaacaaacaaaaaatgcaaacctgatctcatccctcttgctcttcactcttccatggctccccagtgctctcagggaaaaagtccaagtttctgcctgcagcccacaaagccttgcctgatccatcctaccagttccctgctttcctgttgtgcattctcccctagttcccttcccacacagactctctcacgattacttaagtatactgaactcactgaagcctcaggacctttgcacatgctgtttctccaactttgaacacccttccctcttcctccatctcacacccaaagtccagctccaatgtcccctcctccaggaagccctccctgctcctctccccaaaggcagaggatgaggatatctttggcccagttctgaccaaagggacttagagggtcagtgtcagcttgtcccaccccagcctggggccgaggcctctcagaggtctaatccagtggtgcccaacctagcacccagggcatacctgaggagtgaatacaggccctctctacccatgcccaccaaatgctcccagtttgctcccattggtgggcgctgacctgttgctgggcgtggaaaaaacggccaggaccacgggccggcccccgaggctgaccacgcccgtgacagcctgcagcacgttgaagtagaaatgggagtctccgggtacagagcagttgagccgcgccttcaggaaggacgtccactgcttctccagcacgcggggggagcctcccacgtcgttcttgcacactcgggccacgcgggacaccaccacctgggcgtgacagtggacggacgggggcctgagctctgtgtcccaggaaggcctgttcacaggctgtgccactcaccacccaaactgtgatggaggagtctgaccctggctctggtgggaccccggccagtcaccgttcctctctgggcaccggcttccctggcagaaattcccggtgggaatgtcaatgatgataatagcaacagtgacaaccataatcatcactgtttccacgaagacccacattttattctcacatctcttacactcttcccgaggggggcctactgatatccccccattgtacatgtggggacactgataagaggcacagataaaaggaagtgactggtccaaggtcacaatagtagttagtggcagtctgtgcacttcagcactgcctggttgcctggatggacggatgagtggatgagtagatggacggacgattacaatggagggatgagtaggtggatggataaataaatacatctgaagaaggatgatagataatggaagagatggtgaaggagaacaaggtaatcaagcaattggtagataagtagatggatgtgtgggtggatggatgaacagatggatagagagaaagctaggtgagtggatggatggatgcatggataggtgaataagtggatgaatgaatggatggataagtgggtggatggatggatggatggatggatgggtgagttgggtgggtagatggttggatgggtgagtggatggatggatggatggatggatggatggataggtgagttggatgggtggatggttggatgggtgagtggatggatggatggatggatggatggatggatggatggatggatgggtgtgtgggtggatgggcagataaatggatggatagatgggtgggtgcatagatgatgagtgggtgaatgagatggatggatagatgagatggaagggtggatggattggcagatggatggatagatgaaggatggatggatgggtgggtggataggtagatggatgaatggatgggtggatggattggcagctggatggatggatggatgtgtggatggatggatggatggatgggtgggtgggtgggtgggtgtgttggtggatgggtagataaatggatggatgggtggatgggatggatggatggatgaatggatgggtgaatggattggcagatggatggacagatgatggatagatggatggataggtggatggactgatagatggataggatggaagggtggctagatgaatcgatgggtggatggatgcatggacagatggatgagtgcacggatggatggtagtgggtggatgagtgagtgggtgggcagatgagtagatggattaatgggctcatgaaagtgtgggtgggctgaagaacagacagatgggtaagtgggagggtgagcaggtagacggatggacaggggatgaaggatggataagtgattgtggctgggtgggtgggtggacaggtgaacagcaacagcaccaggtgtatctgacttccaactcaagtccctcgtcagggctgagtgctccacggctgctccgtagatgtcttcagcctcagggcctgatcatggctggaaaggaggccctggggaccagaaatggagggcaggaccctctcaccccatgcagggattcatggatccacctctgccccctcacttcgcatgatcagagcctctcaacttcatgccccactgcaccggcctcaccttctccaggtagttaaactccatcgcaatctcccggaagaagaagtagacatggctgccccactccaccgcatggacaaagtaaggctctgcaggacaggaggggtcagaactcagcccctgacatgacaaagggggtttctggggctaagaactcactggcttttatggtgaaggggggacataggctggttacccagacaatatgaaacagactcaaagtttggtattttgcaggggaagggaggtcagaagcctaaaatcgctgtgtctcttgctgcaaatggcaacatcaactattttttgttatcttcctccctcatgtgttgaagagctgagtcctgctatatcttttctgtggttccattttgggcttctaagccacccacttccagcgggttctactttagatccaactaaacttgttcctctagctttctagtcttcaaaaaggccaacagattccaaagatgtggtggaaatctctccaccaagctcctctgggactcttattctggtggggagatttgatgaatgtcaggttctgggccctgccaggtctgggcccactgcccttcctggtctcacctttgaaccacttggagtcatgtttcacggtgcgcagggtgggcctgtccccgaggctgcggtagatgacagcatcaatggctaggaagtcggtaacagtagctgtgaagagcatcccgtctggatggggtgggtggggaaggcaggcaagagatgagaccgcagaggccaggggctgggtgggtcgaaactcgattttctgagactgagtcctgagcctaggggagcccctgtctccaggctgagccctgatcccatccaagccccacctccatccaagccctgaccttaactgagcccctgaccccggctaagccccaaatcccgctgagcctcaatcccagctgagccccaaacctgggctgagagtctgcccatgtcacagctgggacaagtggtcgtccagctgccttctaaacaacccagacgctggagtagaaaatgccaggtcttgcctgtggctggggctgatcagatggaggttgggggggtacttaccagagaagagggcaacattggcgtgcttggggtcgtacgggcagcgggccataccgctgatgttgtctccgacgggctgcagggtgtctatctgcagggaccatggggcctgagtgacagatctcctgaccccacctagcagcccctggctccctcagccccccactccagggggaatcctgatccaccacggattactgtgtgaccttggccactcacttaacctctcagggcctcagtttactgatctgtaaatgggtttaagagtcaatgcctagttagacctgtaactggctcattacctaagtagctacggcttccccggccccctgtacaggcctcgtttggacagcgctgactcctcttgagctcagggggaggaggcagggagagtatatccaggaaggcttcctggaggaggtgacacggcctggggaaaagccatggccagcggaggtcgggcgagcagaggcctggaggttggacctggggcgcagggagtctgaagactcacgctgtagttggcgcacaccgggttgaaggcgttggaaccgcacacaaagagcgtggactcgtcccgaaggagcagcacctttacgaagtttcgacactcgccctgaggtggggacaggaggaagcggggagcgcgatgtgggcgtggtcatggtgatgggcgtggccagaacctgagttgtgtgggtggagggccggtctgttgtgggcatggccaaggcaggggctgaacctaggactggctggggacacggtgcgacccagacagggaaacactttgtatcagcaacgcaggcaaggccaggatggtgggcattgtcagactgtgggcataaccatggcaatagcagagtcctaacctgggatggaggagaaggatccgccctgggtgtggtcacggccgattggggtggggcatggtcgtgaccagaactaactggggcgtggtgggcacggttatagctgattggggccaagttgggagcgtggccagagctggtggggtgggcgtggcctgggcttattggggcgggccgggggcgtggggggcggcaggactgataggggaggggtcgggatggggacctgatcgattgggtggggagtgagctattgggtggcgtgtgaacatggcctgggcttgttggaacgaggctgggggtggtggtaggactgacaggggcagaagtgtgggcatagccagaactatttggggcgtggttatggataattgtggctaggctggaggccgggctaggaccaattgggtggggacgtggacgtggccatggctgtttgggggtgtggccagggctggcagttgggcggggccagggctgattgggggtgggttggggcgtggccagggctggcggggtgggcgtggcctggtctgattggggcggggcatgggtaatgccagggctgattcgcaggggccgggaccgagccagggccaactcacctcctgtttgcccttcatccgacacacgtttatgtcgctggggttagatctccaggtcagcttctgcagacagagagagctggtgagggggtaacgggtcccagcagccctgagtgaccccgccgtgctgggccgaatccacccagctccccggcgcagtgccgcgtccccctggccctacccctccactcccacctgcaccccttcctcaccctctggtaccgcagctccgtggacgtggggggctccagctctacgcggtagaggttgtccctgggggaggggcatagttagtgagaactgggggctccgccaccctctcccgttccatccttcccactgccaatgtggtgtgcacacgggggcatgcagggccatgccaatgcctctgacacgagcaactctagcgccgaccacacccccccaagggccccagcaggccttcatatcctgcactccacctcctgcccggcacgccccacggactgcccccaacaccatgtcccatggccttaggtcaggtgccccactcggcgcctcccaggcgcccaccaggctctctcccctcacacccttgccgaggaagccgccctgctcaacgtcattggtgacctcgtgtagttaagcccagtggtcacttccgcatcctcctcatcctctccaaagcatttgatctgtccggtctctctccttcctgggaagcccatccctagaagccccgtaatctcacacttgcttctccccacgacagcttccacctggtccagcctcaatcatagccagcctggacagcccagtcccctccaccctggtcccctggattccattctcgccccctcccagaagcagccaccagagggcgggcgcgtgtgagcacctgagtcaggtccagtccttcccctacctaaaaccctccgtggctcccaccttcctccgggtcaaagcctaagtcctcccaatggcccaacaggccctgcacgacctgctccatcccctccctgccctcgcctcctctctctctccccctcgctcattctgctcgtcacacaggcctccttgctgtccccagcaatacctgtccccaatgaacagcgtcctgttgacccgcaggactcgctggatgttgaggtcgtcagcaccttctgcgggggtcaggcgtccgggcccgctgcccacaaacacgggatagtggttcaggtctgagtgagggggtggagaggggtgtgagcaagggctgggggtgaagagagggtggcctgaggtcatgccccttctaggggtggctcctggactgcttgagtcccccagtgggggcagcagacccaactgggaacccagatactcccacgggactccacccccgcccaaagacacccccagactcacagtccctgggggccacgctaagcggcggcggctcctcaggaaagaggccgtgggcgccccccagtagcagcagcagaagcagcagggccgggcggggaggggacgctcgcggggtctgcatggcgagggccaggcgacaggaggaggtgacgcctgcgggcaaggggcggcgaggtgagcggcctgcagtcccgctcgtggccacaagacggcgggcgagagcagcagacgctccttcaaatcccagaaaaattcctcacggggataataattaataaaaacaataatggcaataataataataatacacagcactgatttaattatcagaacaactttatggccacgtgtgcgtgaaagcccaggaaacgacttcaaacaaaactgcattcggtaatttaaaactaataataattattataataatagatacaaatatcctaaaacatatatttaaaaatgcaatcgcaaaatacatgcataaaaatacttagaattaaaacacaaaaatattaaactcaaaggctaaaaaaaaaaagagtcaaaggctcttggaattttataagccacaagctggctgtgtgtggtggctcacgcctgtaatcccaacattttgggaggccgagatgggaggatcatctgaggtcaggagttcaagaccggcctgcctaacatagcgaaaccctgtctctacaaaaaaatacaaaaattagccaggtatggtggcctgtgcccgtaatccctgctactggagagctgaggcaggagaatcccttgaacccaggaggtggaggttgcagtgagccaagatcgcaccactgcactccagcctgggcaacagagcaagactccatccaaaaaaaaaaaaaaaaagccacaagctgggaatgacagtactacataaccacagaatcacagaatattccccatgccaagggcctctgtgaccctggtagatctgacctccttcccaaatccagccttttcattctccgcttgcacacctccatgacaggcacctcactacctctcacgggggactgcttcccactcccattcaaggtaactttgcagaaacttctaggtgtgtggagtggagacactctcccatccaggtaatgacatagcagcggaattcaccctctgaacccccgccctccatgctgaaggtcccagttcagagcaccccctaccagaaaggggtacagtccaggtcccggagccccgaatgagaagttcagcagcctcgtccttctgggaagtattgggcaagctccgagcccattttcctgtctgagcagcaggggtatcccccagccctgccctggccttctggctcagggattctgagcccccagaggtgaaggtgattcgcgacaatcggccctggggtgcctgccccctccaaaaacaggaagacctcgcatagcgcggctggacttcctcttcacgaccctgagcttccaggatttgtgactcagcgaacacccggattccacgtgtgttcagggcacggccctgtttccttcagaatttccttccctggctcctcccctgctctacagcctcctgtggctcccagggacccctgagtccaggccccagcctctccctgggattcaaggcccctgacctcagaccccacttcggcctaccctcccctcatgccacgggcctttctagccccctaccccagaacctaactaagagccctgtctgccctgtgcctttaaaaaaaaatggctaaaatatatataacataaaagctgtcatcttaaccattttcatttaactattattagtagtattattatttgagacagagtcttgctctgtcgcccaggctggagtgcagtggtgccatctcagctcactgcaacctccccctcccgggttcaagcgattcttctcagcctcccaggtagctgggactccaggtgcatgccaccatgcccggctaaatttttttgtatttttagtacacatggcgtttcaccatgttggtcaaactggttttgaactcctgacctcatgctatccacccacctcggcctcccaaactgctgggattacaggtgtgagccaccatgcccagcctccttcattcttattatttttttgagatggagtctcgctctgtcacccaggctggagtgcagtggcatgatcttggttcacagcaatctctgcctcccaggctcaagcgatcctcccgcctcaacttcccaagtacctgagaccacagccacgtgccaccacgcccagctaatttttgtatttttagtacagatggggtttcaccatgttggccaggctggtctcgaactcctgacctcaggtgatccactcgccttgccctctcaaagtgcgaggattacaggtgtgagccaccacgctcggccaccttttggttttttgacagtcgccatcctaatgggtatgacatgctgtgtctttcatcttgtgttttatcagaataatatttaattctagaaactatttctttaaacattaagagacagggtctggctctgttgcccaggctggagtacggtggcacaatcaccactcactgcagccttgaacttccaggctcaagcaatcctcctacctcaacctcccgagtagctaggaccataggtgtgcaccaccaagcctgacttttttttttgccgggggtgggggacgcaggggaaggtggacagagtctcactctgtcacccaggctgcgatgcagtggtatgatctcggctcactgcaacctccacctcccaggttcaagcaattctcgtgtctcagcctcctgaaaagctgggattacaggtgtgcactgccacgcccggttaatttttgtattaattttgtaaagcactttgtgaggccaaggcaagaggatcacttgagctcaggagtttgagaccagcctgggcaacatagcgagacacgcccccataatctctacagaacataaaaaattaaccaggcatggtggcacgtgcctgtagtcccagctacttgtgaggctgaagcaggatgattgcttgagcccaggagttcaagaatgcaatgagttataattggtccactgtactccagtctgggcgaccgagtgagaccctatctcaaaaaaaataaaattaatttaaattaaaacaacgacaaaaaaacacctagcaaacataaagcacttgctaggtgccaggcattatcataagtacttaaattaactcatttaatcttcacagcacccccaaggggtgagtgctcttttttttttttttttttttttttggagacaagagtcctgctctgtcgcccaggctggagtgcaatggcgtgatctcggctcactgcaacctcagcttcccgggttcaagcaattctcctgtctcagcctcccaagtagctgggatcacaagtgcccgccaccatacccggctaatttttgtatttttagtagggataaggtttca[265 bp omitted]gttcactagcattaagaacatccacataattgtgcacccatcaccaccaccatctccagaactttctcgacttcccaaactgaaattctgtccccatgaaacactcactcctcacccccctccccagcccctggcacctcccatcctactgtctcagtgaacctgatgactctagggacttcctaggagtgggtcacacagtgtttgtccttgcgtgtctggctctctcactgagcgggattgcctcaagatgcatccacactgtgacctgtgtcagggtttccttcccctttttttttttttcttgttttgagacaatatcgctctgtctcccaggctggagtgcagtggcacgatctcagctcactgcaacctccgcctcctgggttcaagcgattctcctttctcagcctcccaggtagctgggactccaggtgcacgccaccacgcccggctaattttttttttgtatttttagtatacatggggtttcaccatgttggtctggctgatcttgaactcctgacctcatgcaatccacacacctcggcctcccaaagtgctgggactacaggtgtgagcctccatgcccagcctccttcattcttattatttttttgagatggagtctcgctctgtcacccaggctggagtgcagtggcatgatcttggttcaccgcaatctctgcctcccgggttcaagtgatcctcccgcctcaacttcccaagtacctgacaccacagccacgtgccaccacgcccagctaatttttgtatttttagtacagacggggtgtcacaatgttggccaggctggtctcgaactcctgacctcaggtgatccacccgccgtggcctcccaaagtgtgaggattacaggtgtgagccaccatgcccggccaccttccagttttttgacatacccatcctaatgggtatgacatggtgtgtctttcatcttgtgttttatcagaataatatttaattctatttctttacacttttttttttttttttttgagacagggtctcactctgttgcccaggctggagtgcagtggtgtgatctcggctcactgaaagctccgcctcccgggttctcgccattctcctgcctcagcctaccgagtagctgggactacaggtgcccaccaccaaaaattagcacccggctaatttttgttgtattttttagtagagagagggtttcaccatgttagccaggatggtctcaatctcctgacctcgtgatccgcccgcctaggcctcccaaagtgctgggattacaggcatgagccactgcccccggccaatttttgtatttttagtagg[142 bp omitted]gttcactagcattaagaacatccacataattgtgcacccatcaccaccaccatctccagaactttctcagcttcccaaactgaaattctgtccccatgaaacactcactcctcacccccctccccagcccctggcacctcccatcctactgtctgggtgaacctgatgactctagggacttcctaggagtgggtcacacagtggtttgtccttgcgtgtctggctctctcactgagcgggattgcctcaagatgcatccacactgtgacctgtgtcagggtttccttccctttttttttttttctttttttgagacagtctcgatctgtctcccaggctggagtgcagtggcacgatctcagctcactgcaacctctgcctcctgggttcaagcgattctcctttctcagcctcccaggtagctgggactccaggtgcacgccaccacgcccggctaattttttttttttgtatttttagtatacatggggtttcaccatgttggtcaggctggtcttgaactcctgacctcatgcaatccacccaccttgacctccccaagtgctgggattacagatgttagctaccatgcccagcctccttcattcttattatttttttgagatggagtctcgctctgtcacccaggctggagtgcagtggcatgatcttggttcaccgcaatctccgcctcctgggttcaagcgatcttcccgcctcagcctcccgagtacctgggaccacaggcgggtgccaccatgcctggctaatttttgtaattttagtacagacagagattcaccatattgcccaggcgggtctcgaactcctgacctcaggtgatccacccaccttggcctcccaaagtgcgaagattacaggtgtgagccaccacacccggctatcttccagttttttgacagtagccatcctaattggtgtaatatggtctgtctttcatcttgtggtttgtttttttttttgagacggagtctcgctctgtcacgcaggctagagtgcagtggcacgatctcggctcactgcaagctccgcctcccgggttcacgccattctcctgcctcagcctccccagtagctgggactacaggctcccgccaccaccacgcccagctaattttttggattttttagtagagacggggtttcaccatgttagccaggatggtctctatctcctgacctcatgatccgcccacctcagcctcccaaagtgcttggattacaggtgtgagccacagcacccggcctcatcttgagttttatcagaacaatatttaactctagaaactatttctttaaacattgttttaagagacagggtctggctctgttgcccaggctggagtacagtggcacaatcaccactcactgcagccttgaacttccggactcaagcaatcctcctgcctcagcctctcgagtagctgggaccataggtgtgcaccaccatgcctgggtttttttttttttttttgggcaggggggagggagccggggaggggggaaaagattctcactctgtggcccaggctggagtgcagtggctcactaccggctcactacaacctccacctcccaggttcaagcgattctcgtgtttcagcctcctgagaagctgggattacaggagtgcactgccacgcccggttaatttttgtattaattttgtaaaacactttgggaggccaaagcaagaggactgcttgagctcaagagtttgagaccagcctgggcaacatagtgagacaccccctcacaattcctacaggaaataaaaaattaaccaggcgtggtggcacatgcctctagtctcagttacttgtgaggctgaagcaggatgatggcttgagcccaagagttcaggaatgcaatgagttatgattggtccactgtactccagtctgggcaa[137 bp omitted]ggtgaaaccccgtctctactaaaaacacacaaaaaaattagctgggcgtggtggcaggtgcctatagtcctagctactcgggaggctgaggcaggagaatggcattaacccgagaggcagagcttgcagtgagccgagatcgcgccactgcaccccatcctgggtgacacagcgagactctgtctcaaaaaaacaacaacaacaaaacacctagcaaacacaaagcacttgctaggtgccaggcattgtcataagtacttaaattaactcatttaatcttcacaacacccccaaggggtgagtgctctttttttttttttttttttttttggagacaagagtcctgctcttcgcccaggctggagtgcaatggcgtgatctcggctcactgcaacctcagcttcccgggttcaagcaattctcctgcctcagcctcccgagtagctgggattacaggcatgtaccaccacacccagctaatttttgtatttttagtagagatggggtttcaccatgttgcctag[139 bp omitted]agaaaggtaaagtcatttgcccgaagtcagggatcagcggagcccacagatcctgctccattttacttattttgataataacacacaactgaaccccaaatgtttactgcggggagtccaggccacttcacaacgaaccccatctacttagcttcagtttaccccctcgatctggggttacccgacgcctgtgcgcctccccctatccccaagaccatctgcttctctccgtgaaactcgaggagcctctgccagcagccgctcggcgcctgcctgctcagaagcggccccaacacctgccacgctgcggctgccggacacctggtcacagggagccacggggctggcgggtgcgccccgtggcgtgcggggttctccggggcacccgtgcacccacatgtctgcgtgccccaggggttggggggctcctgcctgcaaccctggggacttgcatgtactctgtgggggcgccttgttgggggagaggggccacaaagcaacagctccctccaggaggcccccagctgtcactccagctctgcaaacatgagcccactgtgcagatgtggaaactgaagctcaggaatggaaacgtcctcggggaccccctagtttagctcttcttcctgggagctctgtcctctggcgacccccatgccccacactcgccagcctcactcccagctttctgtcccgccttgcacccccctcaaccgccagctctccgtctctcttttccctcgactcacgcccctcttgggcggccttgtacgctcctgggtcccgaaaccccgtctatatccgatgacacccaccgtcctgactgtagccaggcctcccccagctccggattcggggttcaacttcccctcagccgctccaggcacggggctcatgaagtctcaccctcagccatacggggcacgaccccagaaccgcgccgccctagctactgtcaccccgtcatgggcctgaatttcctgggggaactctcccccaaccttctctcctccaggccagcgcgtctgggctgttcttggcccctgaggcttcggtgtaagttttaggatccggttgtgagttccaagacaaacaacagataaaacaaaaaccctaatggggttctcgctggagtggcactgaggctaccgatccaatcggggtcaacggatggtcgatgtcccccgacccggccccacttctgcgtcctccgtctcagctgatggcttaggacacaactggagctcatcctgacttccccgccacaccccattccaccagcctcacagccagcattagccactcctgcggcctctgccttcgagtttacgcagaactctcaccgcttcccgtccatgccgtggccactcacatccccgcctgcctggcccagctcagcccagcccagtcccctccgccctgatccccaggctgtccttcccgaaacagccaccagaggacgcctctgagcacatgagtcaggtcccgtctctcctctgcccttacccctccatggctcccacctgcctcggggtcaaagccggggtcttccctgcagcccacaaggccctgtacaacctgccccatgccctgtctaccctctcctcctccctctctcccactcatcacttggctccagccacaagggcctccttgctgttcctccaacaggccaggcatggtcctgccctagggccttaccccaggctgtgccctctgctttgggagttcccccagatacacacgcaactcacttcctcacttcaggtcatctaagagaggctccccttggaccttcctggaacccagacgcctctgccctccccactttatgccctcctctcctcccccatcacacgcaggcccgtgtgctgctgggagtgtgggtctgggaacagctgtgtgggcaccactgtcagaaatgcagaatcccaggaccaggcccgctcacccaggcctgcacctgatcaagatcctgcagggatccacgtgcatcacaaactctgagaggtg[139 bp omitted]atagaaataccccatctctacaaaaaatgcaaaaattagctgggcgtggtgatgtgtgcctgtggtcccagctacttgggaggctgaggtgggaggatcgcttgagcccaggaggtggaggccgcagtgagctgcgattgccccactgcactctgagtgacacggcaaggccctgtctcaaataaaataaaattaaaataattgcttgttggggccgggcatggtgactcacgcctgtaatcccagcactttggaaggctgaggtgggtggatcacctggggtcgggagttcaagaccaacctggccaacatgatgaaaccccttctctactaaaaataaaaatattagccaggcgtggtggtgcatgcctgtaatcccaggctactcgggagactgaggcaggagaatcacttgaacccaggaggcggaggttgcagtgagcagagattgcgccattgcctgggcaacagagtgagactctgtcaaaaaaaaaaaaaaaaaaaccccagtgaaccaggggcaccatcgacaagccatcctgccccgccctgctcagcccaatctcactggctggttggggaaactgaggcccggacagaaaacatcggcagctgaagaagtcccagaagaagagctttggctccagaactgcacagcccaggttcaaaccccggctctgcctcagctgtttgaccgcagacagtcacttcccttctccaggcttcagtttccccatctctgtacactgtgggtgatttaaaattcaaccctaaagcacctccatgaggaagaaagaatgtaatctgaaccaatgtgcggcaggtgaaatatgtttttttctacatttttttgtttcctgatagctggtctgtagctaaaattcttttttttttttgagatggagtctcactctttttgtccaggctggagtgcagtggtgcgatcttgactcactgcaacctccacctcccgggttcaagcgattctcctgcctcagcctcccaagtagctgggactacaggcacccgccaccatgactggctaaattttttcgtctttttaatagagagaaagtttcaccatgtttggccagtctggtcttgaacttctgacctcaggtgatccgcctgcctcagcctcccaaagtgttgggatgacaggcgtgagccaccgtgcctggccctttttttttttttttcttttttgcctgagcagggaagttttactttcaatctaccttgaatccttcttacttccagaagctggcttggtccctggctctgtcccaggggtaattcctagcctgggtattgagctgtccttcaagggcaatgcccactctcctctctgaccccggcaccaccaacaagccatccctttactgcatatcccaagctcagctctgaccctgccactcccctgctcaaaggcctaccatggctccccagtgccccacagaagaagaaccaattttgtttgtttgtttgttttgagatggagtctcactctgtcgcccaggctggagtgcagtggcacgatcttggctcactgcaagctccgccttctgggttcacgccaatctcctgcctc[200 bp omitted]caaggacacctcccaccctgggaataacttgaagcttcttcttgccctcacctactatcaggcatttccagcccctccctgcagaccttggctcaggctgtcccctctgctggggaacctttttagcctcctcaaggtccagctgccctcccaaccagccagacatagtaacctcacgctctgtcctccaagccctacagctgactcctgcttaccagtcaaggccatgcatgcgtgtccccgactccaggaagccttctctgactgccctggctgggcctcagtttccctgggttcccccagccacaactaccctgccctcatcttcgctcaaccgccaacttggaagcaactgcatccagctctggcgccctgtaccccaaattggaagtcacttacttactcattggattaataattatttggcaccagctgtataccagacacatgtgttcaggcatggggacacagctgtgaccgagacagctacaaagccctacccttatggggctcccagtcccgtggggagacgggggtacactacacacgttaaccaatatcggaactcgatagcttctgacaataataagcacgaccataaaaacatgaggaatgattagaggaggggacatttgagctgaggcctgaaggtcgaaggggagacctcgtgacaaggtgaggaaggtgctccaaggggaaggaactgcagaggaaaaagcgtggagactgagaccactagaggaagagacagaaggtcaaggtggatggggaggctggcacagcacagaaaggactcctggggctctccccttcactcagacacgacactcagcctcatttcttgtttgtttctaaggacagggtcttgctctgttgcccaggctgagtacagtggtgccgtcatagctcactgcagtctcaacctcccaggtttaagcaatcctcctgtctcagcctccccagtaagctgggatcataggtgtgcatcaccatgcccagctcatttttgtactttttgtagagacggggtttcgctatgttgcccaggctggtcttgaactcttggcctcaagtgatcctgccacctcggcctcccaaactgctgggagtacaggcatgagccaccgtgccctgcccgcatctttttttttgctgttgtccataaaataaagacactagctcagggcctggcacacaggcattcactttaggttaaatgaccttactgtgtgaccttaggccagctacacgccctctctgggcctctctgttccaagatgacagtgatcccaggcaggcttgaagcctccgtttctccatctgccacagcacaagggacgagggcgggatgtctgcctccagttccatacaaggagctccctatcgtccgggccgccccaggattctggctccggggccagcatccctcgggggatcgagtaacctggtcccggcagccgggccccagggccgtccaggtctggttacgggctctgcttacagctgcccctccagctgcctcggtcgcccccatcacagcccagccaggctctggggctgtctaggaacttggcaggaaggctggagggagtccctggggcccaggcatgaggggtggggcagaagagagaggcccccgtgtcccccatcctactggatgtcggttaactcatccctgcccagcctgggaggcggcctatgagcctcccctccactttttttttttttttttttttctgaagcagtctcgctggtgttgcccaggctagagtgcagtggcataatctaggcgcactgcaacctccaccttccgggttcaagcgattctcctgcctcagccttctgagtagctggaattacaggtgcatgccaccacacctggctaatttttgtatttttagtacagttggggtttcaccatgatggccaggctggtcttgaactcctgacctcaggtgatccgcccaagtcggcctcctaaggtgctgggattacaggtg[134 bp omitted]agctccgcctcccgggttcacgccattctcctgcctca[175 bp omitted]cccggcctcccctccactcttgaccttccctcctgagtcctcagttctcagagcctcagtttccccatcagcgaaccaagcatgataaccatccacatcggcttctcatgaggggtaaatgagcaacccatgataggtgcttagttaactgtcgtgactgctgtgttgccttgggttagaaccctcccatctctgagcttgtttcctcctgtgaaagatgaggataaaaatattggctccacaagggcaggggtctgtctcagttactgctgtgactccagtgcccagcatggggcctggcacacagtaggtgctcaacaaatcagctgaacgaatgtcccagcaagagcccccacttataaaatagttccaaggaggctgggcgaggtggctcacatctgtgatcccagtactttgggagactgaggcaggaggatctcttgaggccagttcaagaccagacggggcaacacagccagaccccatctctaaaaaataataataataataattagctgagtgtggtgcgacatgctacttgggaggctgaggtgggaggatcactagggcccaggaggtcaaggctacagtgagctgtgacggcctcgctgcactccagctggacgacagagtgagagccctgacttaaataatactactaatgataataataataataatttaaaaataaaatagctggccaggcgcggtatctcacgcctgtaatcccgacactgggaggccgaggcgggcagatcacctgaggtcaggagttcgagaccagcctggccaacatggtggaccccccgtctctactaaaaatacaaaaattagccgggcgtggtggtgggcgcctgtaatcccagctgcttgggaggctgaggcaggagaatcgcttgaacctgggaggcggaggatacagtgagctgagattgcaccattgcactccagcctgggtgacagtaagactccgtctcaaataaataaataaattaattaaaatagttgcaaggatatgttcattccagacttcttaaacacctactgtgcaccaatatggctggagactcagccatgctcagggttgtgcatgtccagggcttggcacagagccctgcatgcaggaagcactcaattaatgccgagtgtctcttttgcaaaggatgggactctaccctgagccgccttccacattcaactcacagcaggccaggagagaaggaattcaagatcagatttaggaagactgcacctactatgcgccatgcttttcccacatatgaacttatttcttgccggcatcaaccctcagagaccagcaccctcatctctgtttgcagatggaaaaactgaagctcagagaggttaagccattttgctgaggtcacatagcacataagggtgccatggatgcaaacgtgatcttgcttcttgctgacatttttttttttttgagacagggtctctgtcacccaggctggagtgcagtggcgtgatctcagctcactgcaacctcgacctcccaggctcacccgatcctcctgcctcaaccttctgagtagctgggactacaggtgtgcaccaccacacccagctaattttttgtattttttgtagggggtatgatacccaggctggtcttgaacttttgggctcaaacaattctcctgagtcagcctcccaaagtgttgggattaaaggcgtgagccactgtgtgaggccgcctcttgctgacattttccaagtgctcacaatgtgctacctgcccgtgatgatggcacaccctaaatttttttttttttttttgcgacagagtcttgctctgtcacccaggctagagtgcagtggcacagtctaggttcactgcaacctcctcctctcaggttcaagcgattctcctgccacaggctcccaagtagctgggattacaggcacgtgccaccttgcctggctaatttttgtatttttagtagagacagggtttcaccatgttggtcaggctggtctcgaactcctgatctctagtgatccacccgcctcagcctctcaaagtgttagattacaggcgtgagccaccgcatctggccagctgaaatatttcacagataagcaagcagagacccagagagaggctgtccctgtccccaggccactcgggaagccagggtgtgggagcccaggcagaacctccagtggggacgtggatgcatctctggggctcctggggctcctcccctccggggagggggcccccaggtaattaattttaatcactgttttgaaattgggccaccaggaggcaagtcggaaacagcaacttgtaattaggaatgggtggggcggtggggggggttgcaacgaccattcagaggaaattaaagtgtcatttatacccagcaggtaattaagggacccaggagggggtggctcgagggggctggggctccaagggaatccaggctggggctggggcgtcgagcacccacagattccaaagcaggtttggggacggacaggtcctcccttcagacccaatttggaggaagtacagaggggtgggtcgtgagcttgggacccagttgtggagttcagaggagaataaggttctgttatagggactccacttagggaggaagaaagatggcccggcctttgggggcttgatctaggggcagaaaatgaggagcccttcccctccaagttggggttctgggtgcccttccccgcactgctgaactcctcccccagaattcctccagtctctgcccctcccaagaggctggggatccccaggtggccgggaccagtgtgagaggcctggagggggccccgctgagagaggtggtggggaatgggggtggaggtctcagggagtgccaagtgctgctgggaacggaagacctggcgaatgaacttgaagaagacaaaggcgggaaataggtcccaggggaaaggccccggggtcagagcggaccacaagtcctggtgagtcagggctcaggaatgatggaggggctggcagagtgacgtgggtgctgggggatggggcttgagaaccgtcagactgtggagaacagtgttcgaggggaaggggcccccagtttgctgggtcatctcagggaggctgtcatccccatctgtgcctcactgctccccagagcctgaggctccgaccttcaaagagggacaacagcaaacacttacagggtgcctaccccgtgttcccagccctgtccctcactgagcccagcggggtaggtcacaggggctcttctgaccattccataggtgggaaaactcggggccagggtgggcaagggatggggccaaggtcgcacagcccagaaatggccaagctgggatctgaacccgggcccaggagtccagacgctgcgctgttaaccacagcactgccctgcccccagagaaaggggctttcagcctcttcacatccatctcagcaagttttgtgggtgactccaaaaatctgtcccctatccatccactttgcccccctctattacccttgcctggccggcccccatcaattattaccaggacctggtcctcaattccagcctcgcccccgtctgtcttccccaaagctgccaccagagggcaccaagagtcaggtcctgtccctcctcttcccgcagccctccatggctcccacctccctgggggtcgaagctcaaatcctcactgcagcccacgaggccctgcatgactggccccgtactctccttgcccttccctcctcccactctcccctccacactctgctgcagccatacgggcctacttggtgttcctccaacacgccaggtgaggtcctgccccagggcctttgcacgggccgtgccctctgcctgaagtgctgcttcccaagatctctgcatgaccagctccttctcatcttccaggtctcagctcaaatgtcatctcctcagagacaccctccccgacagcctcagtgaacacagccccgcccttctcagccacttgcaagataactgtcttcagggcactgactatacctgatttaccttgccctttctctagttagtgtctgtgctcccctgtccccccacccagctgggaattcgacaagggcaggatgcagtagtctatgccttggtcattgctgggtccgcggcacctggcacttaataggtgctcactaaacatcagtccacttgttaaatgcaagcaatgctcccacagctccaaatgagatcatggccagaagctccacgtttctgctttgcaaggttgttccttttcttggagtcagaaacccaacagaactatatgtggcattttgcctgcaacctcttgtttaaatggtcaaccctaagggaggcagaacagcaacccctgttttacccatggggaaactgaggctcagagagggggcatgagtgagtgagagaaaaaactgattcaatctcaagtcagtctgatccaaatgctacggctgcctatgagggcgataattcagaatggctacttcagcttccccaggggctctgagtccatggccttcaggggagggaggttcttctgcaatcatcagaaaacatatggctgccccctagtgaactcctaaacatccatcatggccctagctacagtgccccttcctggtacatcttccctgatccatgaggcagggtacagctttccctagccccagttgctccctctgccctagccctgaacctgtgtagcacgggtggccagtgcctgcccctgtttctcttcctctggcctggaagcccctccaactagacagaggagttaaagttacctctctgggatcctagcatcacccagcacaggacacagcacatggggaccactggcagcatttgttgactgactgagggacctaattgcctggaaccaggcccacctgggaacccacaatcctcctctgggttcctgtatttgggaagctccctcctaggtccgcccttggaaggctggcttagctgggccatggtgcatcctgggaaatgtagtctagagtgggccttgcctcccagtggggccctggggtggccagctttggaccctggggccagatagagaaggagcattgagggtggcaagtagtagggccccatgtccctgccaaagagtcctaagggtggtccccagcctcccaagtctcttactttttctttttcctttttttttttttgacggggtcttgctccgtcccccaggctggagtgtagtggcgtgatctcagctccttgcaacctctgcctgctgggttcaagcgattctcctgcctcagcctcctgagtagctgggattacaggcgtgagccaccacgcccagctaatttttgtatttttagtagagacggggtttcgccatgttggccaggctggtcttgaactcctggccttaagtgatcctcccgcctcggtctcccaaagtgctgggatcacaggcgtgagccaccgccactgtcttacttgtcctaatgtctgccacttcacctggatgtccctggaggagaggtgatgaaggaccgtgataacgaaaaaggattgcgtgcctgggttcctatggtcacacacccgaccccagcaccaccatgcatgatggtgagggtgtctagggtgaagggtctgttttgggataattcagccaaaggacatggggccggtggctggggcctgaatcctgggctgctttgagccttagtttccctactgctgctacatgaagacagggagggaagaaatgcacgaccatggccaagagaaagccacagcccaaccaaatcacggctgggttttggaggagtcacagtatgagagcccacaaccccttaaatacctgagactctcagaacctgctatctcaaacacgacagcagttcagaaaacccacagtacctggaaattgaaaaaaaaaaatccaggagatcacttggggctgaccaatatcaggattatttatccaggattctgcaaagacagccgtccaacccctctggcctgcctcccacgaggggcggctcaccactccttccagcaatgcatttggtttccaaggagcctgtctcctcgtagctacccttcctcaagatctgaaatgtgactcatgcccctccccctgctctataaccttccatggctccccattgcccttgggataaagtttgctccttggcttggcattcaaggctactgcctacctcatggtcctcttaaatagtctagccactcagggctcctccaacataccccactgtgatgatccttgctgttccctctgcctgcaatgcctgtccccctctcctccaggcagaatccttctccttcaagcccagtcccagtactccctcctccaggcagctttccctgctcccacctgtcctgaccactgccctggaagtttctccctccagcatctccctttccgggcccacaggacagggccacgcccagggtcagctcgggacaccttccttcccaggagacgggcggtgaccagcaacatccttcagtccccagggatccagctcacctgtcctgcaggctgacgtcatggtcacctttccaagggcagtttgatttctatcttccaggcccagtcctggtaaccccagcaaactccggctgccagcctggtgtggccactgcagaggacatgccacatctccagccccttctatgcccatcggtcagaggcgaggactgaggtctcagggggaaaggcccctcctggggggactggatacctaggcttggagacaactcacttcaaagcagagaaggtgacacagaccctaagatcctgtgggggctcagccccagccgagtctggtgggggaaccagaggcaaaatggggcaggcacagatcaagacagtctcaagcgacccctctctgcctcacctcccccaactccagtccaaaaccaaagcgcatctcctggggagactgaagcccagaaaggactagggaccagcctgaggccacacagctaagcgcctcctctcaaagctcctgcatagcccagagtcaaggggaagaagggaggagcagagcttcagggcaacccttaggaggagctgggatgcaggagagctcttgggtttcaacggcttcctcgggcctcagtttccccacctgctgttgggatgggccggttcagaacagacaagaggctgacgccaggctgccacctacccaatatccgaggcgtctctgtgtgggtggcagtgactcccagacaacttcccggagagtttaagaccccctcccaggtgagttccaactcagccttggccccagccgttccccaccacccaccccacaacctgtgctctccctatgtagagtttaaagcaattgttcaggtacatcctgaagtcccgcgcctgaaagaaactggtctcccgggatgtgggaaagggtttgggggcaagggggatgccccaggggtcctgaatttttattttggagagggaatttggaccttctcacaagctgaaggaacacagaaaaacagaaatgcaattttacaaatggggcaggggcccccttcagtcaccatagccatgagtccctctctccctcctccctccttaaacccaaacccagaaccccaaagcctcagagcaccccagtaactccaagtccccgttccgctccagtctaggggtcaaagatgacagcctcaggtagaggatgtcaaagacctcagcgagagagagagggccacatggcggcgggggtgagggtctgcgaatccctcccccaaccccaggactcttgcaaacgctcctagctccagcattaacccggccggggcagaggtgggggttcatgacagtagcgccccctctgggagatgccccaaactcggagagcgcccagaggcggagagcaggagaggagggcacgtgacccccaccccggggaccaatcagcgcccgcgggagggggccacactcggcgccccccacccatcccggcgcgcttggagatagacgttttctttgtccttttgtcagctcttgggggcccccgaacccccaggcccccactgcagcgggggggatccggaccggccggccctcccctccaacaccactgcgacccctgccccgcggcctggacccgcgactcgtcctgttctgggctggacaggaggccggagaggactcgggcgcccaaggtgcggcggccggacgcgaagtggggcggaggggcctcccagtgccaggacccccacaccagccccgggtcgcctcgacttggctctcaggaccccgccccccaacgccacccccaacccccgaccaacaggccccctgcctgccccgaaccccccacctgggccccaatccagctccccagcggcgcagccgcgagcctcattattgtgtcttctccgggcccccccaggacaaaatctccacccgctgcggtgccgacagaacccccaacctagctgcacatacaggcccccagtcaacaatccaagcgccccccccacgttgcggtgccattagacacccccataatggaggctcagggagcgccccaggccaaaatccagcccctccaaagcgatgccaccggacccccaccggatccctccatacggccagcgaccccctctccaatccggtcccctccccagttgtgtggctgagagattccccccctcgttctagcgctccccaaaccccctccctggctccaaatccgtcccctcccagtggcagggcccgcaggccccccagtcctagcgcctgacctggccaccccagccagcctttcggtccccccagctgcgtgccgacagacgcccccatccccgcgcctcccccaaccccctccgcagacgccccggggcgcttacctcggagccgcggccgccgcgagtgcgcgggcgggaggcgcgagggcgggagggcgcgggctgggggggtccgtgcgcgcacctgtcccggccgggccgctcagcccggcatccccggctggggaggggggctgggggcgcgcgctctccccgcccccgggcccacggcgctgcgctgggggagggggctcagccccggccccccgcgcgctggcgtcggctccggggggggcgctgcgcggcggccggaccgggggcgcgccgcggccgcatctcctccgcccgccgcggccgccgctgcgactcgcggctctgccacctccgccccccctttccagcaaccccccacctccccaaagccgggctggagccgcgcaaaacccggcccggagcaaccgcggcgcggagcggagggcggagccggtgggtggcgtttgggtgagttgtgggggaggcccaagggggtcaccctgctttggtccaggtggtggacttattaattgagccgccccaacttcctctcctggtcccctctgttcaaactcgcatccccaggatccagccccaatcacacccagcccatggggtcaatgaggctgtcaggaaccctacggtctgggtggcccccttcatagacgagatcatttcttcaatccacaagtattccatttagcaacattcactcgacacttcaggaaactgaggcacagggaggtcttgtccaaggtcacccagttagagagcgtcagggggttttcgacctgagcaaaccggctgcagagatctccatggttcacgactcccggacctgcccctctgtcgccagcgccctgtgggacgtggcccagaaaggagtttttcgaggactgcaggttcccccatgaatttgagaccccaggacagagcctagaggtttcagagaccttcctgtaaccctcctgacccttcgaatgaattcaggacagcaggggctgctctccatgcctcagtgcccctccctgtccaaagtacctccccatgtggatgtgatcctgtacgtctcccccactggactgagtgctgtcctggtcgctctggcctctctccatacagtagatgctctgtaaacacttattttttcttgtcttttctgtttttcttatctttttctttctttctttgagatggagtcttgctctgtcacccaggctacagtgcagtggcatgatcttgactcagtgcagcctccgcctcccgggttcaagcagttctcctgcctcagcctcctaagtagctgggattacaggcaactgccaccatgcctggctaatttttgtatttttagtagagatgggct[136 bp omitted]taatagagaaatgggggagagagaggatagatgatttttttaaaaattgttattattatttgtagagaccggggcttgctacattgcccaggctggtcttgaactactggcctcaagcgatcctcccaccttggcctcccaaagtgctgggattataggcatgagccactgagaccagccaacactttgttgttatgtagcttgtgacttttcttgcacacttactgagtgctggggccactatgccccatccctggctccgtgccatccagggggtccagacaggttgtgcactggcttccagcagccactcagtggggactgggtatcaggacttgaaccccgctccccaggccacccacggcaatctgcaggctccctggcacccatggagacagcccaggtcttccagttcctgggcatgttcccagggccatcctggtgaccacaaacctccgggagcagccaggccttcctgcccgtggttttgcccttcccgccttccggccgccccagcatcccaggcaaatcagccaaggcacctgctggtgtccagcccccaccccgccccgtgtcctgcccgctgggggccactgaggcctgctccacaagggagggggccgagccccagctccaaggcttggggtctagaatctgcgtcctcccacctacactcccttccctgcgctgtgcccagcccctggcatcccctccctcccctgccttcttggctgtgcccagctgggtacttctgcaccctagtcattcagcaaacatttattgagcacctactgtgtaccagatactggactgagctgtcaacaagacaaatctgccctgtgccttttgtctagcctggggatacagaaaccagtgggcacagaactgcaggctgagacagactggctggaggtccaggaggacctcgaggaggtggcatggaggccttagagggaccatagatccaagcaggggggtgggggtaggggtgtgcggggagggcgttctaggcagagagacctcggggacaaaggccttgagggaggccccacccccaccggtggctcagctgccacccaggcttctgcgaccatgaatgggtctttcatgtcctggaccggggcaaggtcaggccgggcctctccctcctcccgcccagggctcctggctgtctgagccctgacctggaggacagtggcaggatgggccagggaggcccagggaggggcagggcatcgcccgaggtcaccagagccagcagcgccctcccagccgtgggattctgagcaaagccccgccccgctgggcctcagtttccccggcctgggcgggcgcgttggcagcgcagcgctcccgtcctgctccgaccgggtggattccagtgcgggttttgcgggcgcccgcggccaccgacaccttcttcccagtgcggcccgggctgcggccccgggtccgaggaggcccggggagacccggaggaggtcagaaggccttcagggtccccgggatggggtgaggctgagctcggccccttactgccggcgcctgccaggaagggaagccccgccccaatgcctgcgcgcccccatcaggaccactagcctcgtcgccccgctgtgtgactcccgggggtccctggccctctctgggccgagctgtagtcaggctcacgggcagccgctcagagaggtcgcctgggtcccatcccttccccaaatggccccccgcctcagtttccccggccaggtgcaggctctctttaaccccaggttggggggtcctcgctgctaggttgcaccccgggtctccgctcaggccagggaatcccctgggggctccgaacgggcagctccgattggctggggccacgtgtgacgtcagagcctccccaacgccccctcccctagaggcaagtgggggcggtcgcggccggggaggggtcccgggtccgagcggattcggggtgtccccccagctcaagtcggcagctgggccgcgcagacgcgattctcctcggacagatttttccctcgtcccaaatccccctccggccccccccagaacggcagctgctcaggcggcagatgcgccggctaaatccgcccagctggtcctccgcggagctaaccgcctggagccccggggctgggggagtgctggccgcatggtcctgacccttcctcgctccctgttctttgacccctgactcttcgcggaaaggggccgggattctgttgaggacactttctcaacctccagttccctcctggagctgctgagaggatttgggggagtctggcgcccagagagggtggagccctttccaaaaaccacacagcatccctgggcgtgctgtccaaaatatgccctgtattgcgcatatattaataattatgatgatgacttaacatattaggcctctgctatatgcacccccacgattctaggactattatgctattactccattttcaaaggtggaaactgagacccagagagccgtgacttgactgatcccacagccaggaaatggtggagcctggatttgaaccccagcttttaagaagaaggtgccactgtcctggaagaactctcaggacagcattagtgtctcagggatccccctaatcggaggggccttaaggcaagtgagtgtgacctggggtgagtgagtggggtctcttagacctcttccctgccccctgcctggtgcccctgagcctgacacagactgcctccctgccttgctttttcagcctaatcatgattgtcactgaagatccaggagggcttcctggaggaggaggcagctccattctgaaatgccaagggtacagctttattgggacagccagtgtctctgaatatgtaggttttgcacagagcttgtactgccccagggcctgtacactgcctgtcccctctgccttgtgcactctttccctagatgtccaaatggctcctttcctcacctaccccaaatctcaattccagtgtttccccagcctcccctcatttcagtaatcactctgcagtgagctaggattgcgccactgcactccagcttggataagagaacaagaccctgtctcttaactaaatacataaataaaaataattcccctcttcatccctctttaccctgttttgatggttttgttcaacttttcaccaataggactttctcttatgcatttactcgtttctcttccaatccctccccaagacagtcaagttcccaagtctgtccaggactccactgtgtcacgaggcttaaaacagagccaagcacacagtaagcactcaacacatgtggtgaatgaatgaacgaatgaaggagtgaatgagtgggagtctgagatttcaacagggcttgccttcattgtatcaaaggggaaactgaggcccattgatcagagagtgagaccagagtcacttatttttctctttagcaaaataggacataatggtgaccacctccccagtatgcagcaggggtatccagggaaataataatgtcggaagcacttattaagcacctactgtgtgcactgcacagctccaggtgctttgcgcatttcgaatggagacaaggactccaacccagaacccaggacgcctggtcccatggtcagcctgagttccctacacctcactgcttccctctcattgagagaggggttatatatgcaagctccgggtgcacaggagaccttcagccagggaggcagtggtccccactgtgtctgaggccccctctgcagccccgcagaccctgggcccgaggttcaggctgtgtgtctggctggagctaacagcaccatgcctgcacgcaggaaacattaaattagagacggaagcagcaggacctgcgcctgatttataaattgaaattagagcaattacaaggcttcctccttctcagaaactgagaaatcccccagaaaggcccatgtgtgtcctgggttggcccagaaccccctcccccaaggcatcatctgcatatgatgtagtgacaaatgaggcagtggcatcctggtctccaaaacaaggaatttgtgggtggagcgagggtgtccagggaccttcaacctccctggggtctgtccttgggtatagataggaaactgaggcatgggaggtgagtgtcatttgggcaggggcaggtgtcacattctccgctttcaaaatctcccctctggcctggtgcggtggctcatgcctgtaatcctagcactttgggaggccaaggagggcggattgcccgagctcaggaattcgagaccagccagggtaacagcaaaagctcatctctactaaaaacacaaaaaatcagccgggtgtggtggtgcatgcctgtaattccaactactcgggaggctgaggcaagagaatcccttgaacccgggagacggaggtttcagtgagccgagatgatcgtgccactgcactccagcctgggaaacaaagcaagactctatctcaaaaaataaaaaaataaaaaataaatctcccttcccctagatctcccttcccctaggcttcccattccagcctagtgagcacacccagctcactcctgcctcggggccttggcacttgctgttcccactgcctggaagctgttccccaccaacgttcccttctctgagaggccttccctgatcatcccaagttggagaggatggctcttttccacccactgttttcttttctctaaaatcagtgatgggatagtgagctgcctgtcaagagaggcaagcaagcagacagtggagtggatgtgatctctgcagctcacacactggcgtccatcccctagctttaccactcaccagctgtgaacaagttgtttaacatgagaacattccaaaagatgccggggcctaggacggacgccatggctcatgcctgtaatcccagcactttgggaggctgaggtgggtggatcgcctgaggtcaggagtttgagaccagcctggccaacatggtgaaaccctgtctctactaaaaaatatataaaaattagctggacgtggtggtgcgtgcctgtaatcccatctacttgggaggctgaggcacgagaatggcttgaacctgggaggcagatgttgcactgagccgagatcatgccgctgtactccagcctgggcgatagagcgagactctgtccccccattaaaaaaaaaaaatgctggagcctgtcacatagttggtgcttaataaagataagtagtcttctccatgggaggtcctgagattcttgtttcttcctcttggtgatttttcctaatcttcctcctctcttggaagctgtgggaaggagctttgatgccgttacatttgcgtagggcattgtcaaaagagaaataaaaacagatgaccagaacagatcctggcacccgtgttcacagcagcaaaagggcagaagcaaaccgactgccaatgagcagatacatggatcaacataagggggtccatggacacggtgaaatatgactcagccatcacaggcttcagatgtggatgcatcttgaggacgtcagactcagtgaagtaagccagacgcagaaggccaaatccagtgtggttccactcctagaaggtccctggagtcatcagattcatagagacagaaagtagatggggagtgccagggactggggagtgggtggggagtgagtgtttcttggggacagtttcagattgggaaaaggagaaagttccggagaggatggcggtgatggttgcacaaccacgtgaatgtgcttaatgccgctgaactgtgcacttagaaattgttaaaatgctgatttttctgtgatgtgtgttttaccacattttttctttcttcttttttgagacggagtctcgctctgtcccccaggctggagtgcagtggcacgatctcggctcactgcaaactccgcctcccgggttcacgccattctcctgcctcagtctcctgagtagctgggactacaggcgcccgccactgcgcctggctaattttttgtatttttagtggagacagggtttcaccgtgttagccaggatagtctcgatctcttgacctcgtgatccgcccccctcagcctcccaaagtgctgggattacaggagtgagccaccgcgcctggcccacattttttctttaaagatagaaagaaaaccagaactggtatgcagaaagggtggcaag[143 bp omitted]gaaaccccgtctatactaaaaatacaaaaattagccgggtgtggtggtgggagcctgtaatcccaggtactcgggaggctgaggcaggagaatcacttgaacccgggaggtggaggttgcagtgagccgagagactccgtctcaaaaaaacaaaacaacaaaaaattagccagacatggtggcaggtgcctgtaatcccagctacttgggaggcagaagtaggagaatcacttcaatccaggaggcagagattgcagtgagtcaagatcacgccattgcattccggcctgggcagcagaatgagactctgcctcaaaaataaataaatacataaataaaaataatagcaacagcagaaacaggcagtgacggtggagggtgtgtgtgtgaatgacctcagctagtggcagttcgtcattgccactaaggccagccacacaggtgacactgacagtgtgcagagaggccatcaagggtgtcgagctcagatcacacccttccctccccaccagggggcctgctcagcgtccactacaaaacctccgacaccttcaggaagcagaactgagcctcgggggtcttgccccttgctggcctatttttcagctaactttattgagcacctactgtgtaccaggctctactaggcagtgctggggacacagtggctgagcaagacacaaatggaccctcatcttggcagagttcagagatcagaggcgaggattcactcattttattttagtttttagagatacagtctcactctgtggccctgggctggagcgtggtggcctgatcatagctcactgcagcctccaactcccaggctcaagggatcctcccacctcagcctccccagagtgctgggattgcaggcatgagccaccacgcctggcctagcagaaagattttaaacaggtagtcagggaaggcttcactgaggaggtgatatgtgagcagagacttgaagaagagggggtagaaaatcatgcagcggctgggcaaagtggctcatgcctataatcccaacactttgggaacctgaggcgggcagatcacttgaggtcaggagttcaaggccagcctggccaacatggtaaaaccctgtctctactaaaaatacaaaaattagccaggcgtcatggcacacacctgtaatcccagctactcaggaggctgaggcaggagaatcacttgaacctgggaggcggaggttgcagtgagcagagatcatatgtctaaaatcttattgccagcctgggcaacagagctgtctcaataaataaataaaaaatcatgcaggtacctagggaaagagtgtagtaggtgggcgggcacagccctgtgcaaaggtcctggggcaggaccgtgcctggcatgttggaggaacaacgaggaggcccgtgtggctggaacagagtgaggaatgggaggaagggagggcaggcaggtaagggggcttttggaattaattcagctcctctagggcgccaagctctaccctgcctcagggcctttgcacgggctgttctctcctcctggccttctgcctccctctccccccaggttgacctggtcaacccgtcctccttcattcccaaggtaaatgtctcagtttgaatcccacacacccgactgggagcccaaggaccgggcccagaactgtccaggccaaggtgatgtccagcactgcccaacatagagttggcatacagtaggcactcaataagtgtctggtaaggttcaggagattgtcagggaagcctccctgcccctgccctgcaatgatggtgaggctggtggccctcccttatctggactcagttttcccttccagaagattccaaaggctgcgtccaggatggagatgggaaggtcgctcctctactccaaaagcatggtgggggacaggtccctctgtagtccgtccccagcctgctctgcgactgcagggggaacctgccttgccctctctcctcacccctccaggcctctctcctttcgtctccgtctctaggtccatctcaccgcctgcttcctcatctctcaatcttgctctctcactgtctctgtctcagtctttcccctgggtctccagttttctatccccccatccccgtccccaccccagggtctagagatctgctcatctttgggcaaagcctggaggccaggaaggaggagggggtaggggaagttccagatgctcctcaaccctcacccgcctaagtgtgggtgggtccccaaggaacctgggctgagacagctctaccccctccccagcttcttcggggatccccaaggccagtggggaatttctagggagaaataaacatccgtatcatttacataaaatctgcatcaattagcatatcgattacaagagtctacagaaccaggcaagccgtttgcaaggaaaatagtaactttaatgacaaatgaggccagcagcttctccatggaagcgacttgtcacacttccaccctgctttacaggtgggaaaaccgtggaggtgagttctagacagagagagggagataatctaggtgggcagggtctctgccctctccaggcatttgcagatagataatgaggaaacaagtaattggctaaaatgatttcagattattataaggaccaggaagaaaagaaatgaaggaggccaggtgcggtggtggctcacgcctgttatcccagcacttagggaggccaaggcgggtggatcacctgaggtcaggagttcgagaccagcctggccaacatggcaaaaccccgactctattaaaaatacaaaaaattagccaggcatggtggcatgcacctgtaatcccagctacttgggagactgaggcaggagaatcatttgaacctgggatatggaggctgcagtgagccaaggtcatgccactgcactccagcctgggcagcagtgagactccgtctcaaaaataaaataaaataaaaaataaaacaaaattgccaggcacggtggcatgtgcctgtggtacccgctgctcaggaagctgaggcaggaggattgcttgagccagggaggttgaggctgcagtgagctgtagtgacaccactgcactccagcctggatgacagagcgagaccctgtctcaaaaaaaaaaaaaaaaaggaaaatttaaaaagagaaaatgaagggcagcgattctctgggggcatcagggagggcctctctgaggaggtgacattgagctgagacctgaaggaggagtaggggccagatggggaggaaatatatatatatgaagagcgaagaatgaaggaggactccaaactctttcccttccatccccctcgccacctgttcttcaccctctccaatcattcccatcatcctttgggctcagctcatatcatctcctccaggaagctctccttgactgccccaactaagtcagccttgttcctgccagcttcccagagcccagcacagggcagaagccctacacgttccccaggagatggaaagaagattccctggttctggggactgaagattttgacaagctggtaatgcgcacctctggtcagaaccacgtctgcagaggaaagacccagccatatccctcttttctcagctgcctggtaggggaggagagggcagaggaggttgagtttcttggggaaaactggggtgccatcagctgttcccctccactgccttcctgtagggggtccctggggttgagggcttcagcccagctcctggggtgggaacccagccaggaaagatctggagtgggagagaaggaagactgggaggggccaggaaagtgtctatttttcctcctgcagctgtatttatagattccctttgatgtcccagcgttgggctgacctggttcttggctgcatcaggagaaagacaggttctcagagttgtttctagaagttgggcgggcggtgggagggtgggtcctcaaatgaggagagctaggtatgcaacaactggacccctgagcttggagggggtctgggatggggggaggcaaggagctggcctcagtttccctgtttgcaaaatggggatttacatgtctcttccaggttctgttcagttaaagagaagagaaacttaaaaaaaaaaaaaagacatatatagttctcaaaaagttgagactgggcaacatagcaagacccctatctctacaaaaaaaattttgaaaaaaattaacagggcatggtggtgcttgcttttagtcccagctactcgggaggctgaggcaggaggcttgcttgagcccaggaattggaggttgcagtgagctatgattgcaccactgcattctagcctgggcaacagagcaaggccccgtctctaaaaataaagaaagaaagaaaagaaatgctgaaaacttgagtcacccaaacgtcaagtaagcacatgtccatgattcattagctcattactcagggaaccaataaaatgttgaggctggttctaagagtatttgaggaactaggtatctacggagatttttttttttttttgagatggagttttactcttgttgccaggctggagtgcaatggcgcggtctcagctcactgcaacctccgcctccctggttcaagcaattctcctgcctcagcctcccaagtagctgggattacaggcacccaccaccatgcctggctaattttttgtatttttattagagatggggtttcaccgtgttggccaggctggtctggaactcctgacctcaggtgatctgcccacctcagcctcctaaagtgctgggattacaggcgtgcgccaccacgcccaactaattttgtatatttagtagagatggggtttcaccatgttagccaggctgatctcgaactcctgacctcaggtaatctgcccacctcagtctcccaaagtgccgggattacaggcatgagccaccgcgcccagaccgagattgtttttttttttaaggtggaatgttagattaagatcaggctagatacaaacgaattaatggtctatatttcagtaaagccctagttggggttctcttttctaccagacagacagaaatgatcaagttaactgtaacttcgcagggcctgagctctcatcacatggccaagtcatagacaagcacatgctcccacagcaaggttccaacagaacttcctgcagtgaaagaggcgtttgaaatctgtgctaacacagtagtcagcagccatgtggctattcagcgcttacatggtgacttgaggctgagtgcagtggctcacggctgtaattcctgcactttcagaggccgaggtgggttgggggatggcttgagcccaggagtttgaaaccagcctgggcaacatagcgagaagctgtctctaccaaaaaaaaaataaaaattagctgggcgtggtggtgtgggtctgtagtcctagctacttggaggctaaggtgggaggattgcttgagcccaggaggtcgaggctgcagtgagctatgatcccaccactgcactccaggctgggtgacagagcgagaccgtgtctcaaacacacaaacaaaaaacagtgacttcagcaagtgaggaattgaatttttaattttatttcattttaattgacaatttaatttatttttgagataagctggagcacagcggcgcaatttcggctcactgcagcctccatttcccgggttcaagcgattctcctgactcaacctcccaagtagctgggattacaggtgccggccaccacgcttggctagttttttttttttgaaatggagtctcactctgttgccaggctggagtgcagtggtgcaatctcggctcactgcaaactctgcttcccgggttgaagtgattctcatgcctcagcctcccaagtagctgaaactacaggtgcacaccaccacatccagctaatttttgtatttttagtagagacgggttttgacatgttggccaggcgggtctcgaactcttgaccttaagtaatccacctgcctcagcctcccaaagtgttgggattacaggcatgagccaccgcgcccagagattgtgattattattgactggattattttgtgctgtaaattgggtaacctccgtcttcataccttagttttcacatccgtgaaatggggtcagtaatacttgggaacacagagagctgttacaataatagagtttattcatgaaaagactttttttattttttctttttgagatggagttttgctcttgtcacccaggctggagtgcagtggcgtgatctcagctcaccgcaacctctgtctcccaggttcaagcgattctcctgcctcagcctctcgaatagctgggattacagtcatgcacaaccatgcctggctattttttgtatttttagtagagacagggttttgccatgttggccaggctcgtctcgaactcctgacctcaggtgatccaccctcctcagcctcccaaagtgctgggattaccggcatgagccaccacacctggtctaattttttttttgaaacagggtctcctgtcgcccaggctggagtgcagtggcacaatcatggctttctgcagcctcaaactcctgggcttaaaccaacctccagtgtcagcctcttgagtagctgggactacaagcacgtgtcatcatgtctggctaaaatttttattttattttatttttgtagagacagggtttcgtcatgtttcccaggctgatctggaactcctggcctcatgtgatcctcctgccttgcctcccaaagttttacagaattacaaagaattcacgaattctttgtaatttgtaaaaaaaatttacaaagaattacaggcctgagccaccacatcatcttgtaagtattattattggtggagatgaccagagatgttggctaaatttcccaaggccacacagccgggcaaggccagagctcggagttgaagcaaggtctttccagtgaaggctgggagcagtgcccgggctctctatggggtcaagagggatggcatcgggcctctgaggacccggcgcccaggctccagggttaagcctgtgtggcagctgaacttccgcggacctgtccctctaaaatccctgggaagcaaggcatcaggcgttccggaacaggcgcctgctcctgtcgggctggcgcacacttggagagacagctggcaggggactgacgggccagggaggaggggcctgggggggggagggggccttggccaggagaagaggtcaggagctgctccaacccacccacctccagatgggagccaagcgcctcctctttcgcattctctaacgcctctcaattccttcatccacttttgacaaatattattcaacacctactatatgccaggtgccctcctgaaccctttagttgagtaatatgtcaggagtcccctttacagatgtggagatcaggctcagaaagcactggccacttgtcctggacaaacagcaagaaaatggctaagctgggattgccagccagggctcttggtcctgactcagggcctttgcactggctctttcctctgcccggagcacaggcgtgagcctgccccgccaatggggtttttttttgttgtttgtttttttgttttttttttttttgagacggagtctcactctgtctcaggctggagtgcggtggtgcgatcttggctcactgcaacctccacctcccgggttcaagcgattctcctgcctcagcctcccgagtagctgggattacaggcgcccgccaccaagcccgggtaatttttgtatttttagtagagacgagggttcaccatgttggccaggctggtctcgaactcctgaccttgtgatccgccggcctcggcttcctaaagtgctgggattaccggcgtgagccaccgtgcccggcagctaatggatttctttagccctcaggttagatcacacgtcctgaggaaagccttcagggagccatcataaactcccgtgcgccccccagctaggccctctgacccccatcaccgcaatgaccacctcccccactgaactgcgaaccgcactgggggcgaggccggctctgtcggggtcacgtatccctgtatccctggcccctagcacaggtttgcagagctcacgactgtaggtactagacgctctatatacgaatgaaaggatgaagggatgaagtcagaatttctgcccatcgcgcacttccatgctgggggaaccccagctcaaggatgaggaatcaggtgctgaggtccacgctgggatctgaaggggtcttcatggaggacggtccttctggcagggtctctgctcaggggagcccagcccgggactggtgtgccgggcagggggtctctgtagggagagtccctgccgaaggggctggaactgtgcggggcgcccctgaatggtcgaacctggagagctttgttgctcagatgaggaagggccagggaggccaccctggaccaaagggtcacgtttctattcttcctggcccagaatggacagccccagaagaagctgacagtcggggtgcgccccgcaaggggaggagctgagagaggggcggggctgagagaggagggggctgaggaaggagagggggctgagagaggggaggggcttagaggggaggggtgagggaggagaaggggccgagagggggagacgttcagaggggaggggtgagggaggagaggggggctgagagacgagaggggctgagagaagagagggggccgagagaggacggggttgagagaggggaggggctgaaagtggtaaagctgagaggagaggggcggggctgagaagaaggggcgaggcgggaaggggcagggctgagagaaaatgggtggggctgagaggagaggggcggggctcggaggcggggggcgttgtggggcagggctgagtggggcggggttgagaggagaggaagctgaggttggggaggggcgtggagaggggagggggggctcttcgaggggcgggaacagggctcaaggaggctgagtggggcagagggggccgcctaagttctgtcctcccctggggccccaggacacagggtcaggagtgtatcaagtcaccgggtttctgaccatccagaaacctgaccgcgtgcgtccccggggctcggggtcgcccctatcccatgctctacctccctccctctcctcgggccctcctggctccctctgacctccccaccgccagtcagctgtgtctgtatttagagcggtgcaggcctgtgtcactttacttccgaaagggattttgcatctcttagtgctgccttcagaacccccaacacctgttgcggcgcgagcccgtgccacggggagggggtggtctcgcttctggagccactgtgggggaggaggctcagctgcctcccctccccgagaaccttctccctttgtgcaccccctcccttctgagccccttctctaagtccccatgtccccctcccgtcccggagcccccccttctctaagtccccccggccctgccccctgccctctcggagccccctctctgcacgccaactcagagccgcctcgttcccaggctccccaaggccccgagccctgcctgtccccctcctcccctggcctgtccattgtcctggtgagggggtcctggaggctgggcgggccggggtctgcatgcagggggcgggagtcgcctgctacccagtcgtctctgggcaacgctggcaaacctcacgcctagacacagaggctgcgctgttctctgggaggggacagggggcacaaggtgactggggagatgctgggggtgacggctgtggatatgagttttcaggcagggggtgccagaggcagctccaactgctccaggtgggagaaaggttcgagagcgtggccatgggaaacgttgtccccctgctgtccccacggcgacctccaactcactcgacatccttccttcctctgcaggccctcctgctctgccccatcccacagtggggtcttccatgcctgctctgatatgttcatcatcacagccttcccagttggattttgcaattaaacccactttacagatgagaaaaccgaggcccagagagcatttggtgattgaagcagtgaggagaccacacttttggggctatggcccaggacccgagccccaactctcctgttttctctccacatgacctaacagcttctctgagcctcagtttactcatctgtaccgtgggcagatggtggtacccatttcctgggctgtttttactgtgtggggaataagatgcttaaacagtctagggttcaaacttgggtgccagttaccagctgtgcaactggtcaggccatgttgccgctctgtgcctcagtttccccgtcaacaaaatggggtctataatagcatctacttcataacgtggctgtgacagtgaaagttaattctaggccgggcgcggtggctcacgcctgtaatcccagcaatttgtgaggccaaagtaggcaggtcacttgaggttaggagttcaagaccagcctggccaacatggtgaaaccctgtctctattaaaaatacaaaaattagctgggtgtggtggcggccacctgtaatcccagctactcaggaggctaaggcaagagaattgctcgaacctgaaaggcagaggttacggtgagcgaaactctgtccaaaaaaaaaaaaaaaaaaaaaaattaattctagtacatactggcttgtagaaaaccctttataaatgttattgttactatattttttccttctgagtttgtgccttttttcttttttggtgatagggtctccctctgtcactcaggctggagtgcaatagagtggtctcagctcactgcagcctccaactctcaggctcaagttatcctcctgcctcagcctcccgagtaggtgggactacagatgtgcgccgccacgcctggctgttttatttttttgtagagacagggtctcgcaatgttgcccaggctggtctcgaactcaggcttaggtgatcctcccgcttcggcctctgaaaatgctgggattccaggcatgagcctccgcacctggcttgagtttgtgctttctatgaggttcagagaggcttgtgtgtggggaggtcatcgtcccaggcccttccaggccctcaggcttggagttagggattgagggtgtgagatggttccctggggtaactctatctgggaaccagtccccgtgcctgttgagtgatatagtggattccactgccacaccttctgtctcccctgcctgaactgtgtagacgacccagggcccctgatggtgaggactctgagtctgcccctgtcagggtaattgccagagagtgcacagagcaaagcctccatagctcccaccctggactgtgactccctgggtgcagagggggtgcagaccctgttttctgcacataaacaggtgcacctgttgggtcctcacttgaggctgctgggccagcagccccctagctctcccactacaagcagaggggagaaggggcatagctgccccctccgcctgccacagcagtcaccaaggttcctgccagctgctcccttctcagagttcactgggcatcagcctgtcaggcactcacagccgtgccctacctcctggggttaccataaacatacattaacagccccatccagcacttattgaacccgatatgcaacatgtgtaattgcatgcaatcccccccaacagtccccaaggaggcaggtgctattatcagcctcattttatagatgggaaacaggctcagagaggttctgtcacttggccaaggtcacacagcagggaagtcacagagcagggattcaaactccaggctgcattctttatttttttattttttattttttctgagacagggtcttactctgttgcccaggctgtagtgcagtggctcgatctcggcttactgcaacctctgtgtcccgggctcaggtgatcttcccacctcagcctcctgagcagctgggactacaggtttgcaccaccacacctggctaacttttgcgtttttttgtagagacagggtttctccatgttgcccaggctggtcttgaactcctgggctcaagcaatcctcccaccttggcctcccaaagtgttgggattacaggtgtgagccaccgcacccagcccaggctgcactcttaaccaccaccctttgctgtctgtcacaacaaataacaactgtgtgtggcctgaggccactgtgcaaaacttggaggtctgtgctctcatcagcctcactgtgcagaggaggaaagcaagggccagagacagggagggcctggctcaagggcacaaagcaggcagggggaggaataaagatgagcataagggttagcctgcctctgagtgaatgagtgcatgaggtagggagggagtgagggtgg[137 bp omitted]caaggtgaaacctcgtctctactaaaaatacaaaaattagccaggcatggtggtgggcacctgtaatcccagctacctgggaggctgaggcaggagaatcacttgaacccaggaggcagagctttcagtgagccgagaccgtgccactgcactccagcctggcagcctgggtgacagagtgagactccatctcaaaaaaaaaaaaaaaaaaaggtggtgaatggatgggtgattagatagatggatgtatggatgagtgaataaatgaatggatggattatggatggattatggatgaatggatgagcgggtggatggatggatggatggatggatgaatagagaggtgggtgggcaggttggtcagtaaatggatgtatggatttgtgaaatgatagttgtatggacgatggatggatggatggatgaacagatgaatgtatgcattatgggtgagcggactgataaatgggtgcaggtgtggattacggatggatagatggatggatggatgaatagagaggtaggtgggtaggtaggtgggtaagtggatgtatgtatttgcgagaggatggatgtatggattatggatggatggatgaacaggtgaatgtatggattgtaggtgggtggattgataaatgggtgcaggtatgaattatagatggatgaatggatgtatggatgagtggatggatgaatggattatggatggatggatgaatgggtaggtggatagatggatgagtgaatggatgggagggcggatggttatatggattatgggtggattaatgggtgggttagtggataaatatatggattatggatggatggatggatgagtaaatggatgaatggatgggtggatagatggatgtgtgggtggatggatggatgggtgagtgcatggatatatggattatggatggatggatttggatagatggatgagtggatgggtgggtggatggatggatggatggatggatggatgggagtattgatgggtgggtggatggatggattgatgggagggtggatggatgggtgagtggatggatatatggattatggatggatagttggatagacagatgagtagatggatggatgggtagattgatgggtgggtagatggatggatggattgatgggtggatggatggatgggtgagtggatggatatatggattatagatggatggttggatagatagatgagtagatggatgagtggatggatatatggattatagatggatggttggatagatggatgagtagatggatggatgggtgagtggatggatggatgggtgagtggatggatatatggattatggatggatggatctggatagatggatgagtggatgggcgggtggatggatggatggatgggaggattgatgggtgggtggatggatggatggattgatgggaggatggatggatgggtgagtggatggatatatggattatagatggatggttggatagatagatgagtagatggatgggtggatgggtgagtggatggatatatggattatagatggatggttggatagatggatgagtagatggatggatggatggatggatgggtagattgatgggtgggtggatggatggatgggtgggtgtgtggatggatatatggattattggtgggtggatggatggatgagttagtgggtgggtatatggattactggtggatgtattaatgggtgagtgaatggatatatggattactggtggatggatggatggattgtttttcacccttcctctgtagggagctctaagcttggttcacacagcagatggggtgagagggtggtgggtgggatagacactactggagtcagttccaagtaggtagagaaggattctggaatcaattccagggcagcatctaagagagcatccagccattcactccttcagcaaacacgtattgagcacctgctgcatgccaggtgctcttctaggcactgggcgtctgtccggcagggaacagagcagacaaaatccctctcctgtggggctgacaacttcaggagggcgtggggggtgtgagagccccattggagcaggtttaggagggaacaggaaatggggaagtggagacagcaagtgttgatggg[142 bp omitted]tctactaaaaatacaaaaattagctgggcgtggtggcatatgcctgtaatcccagctactcaggaggctgaggcaggagaattgcttgaactcgggaggtgaaggttgcagtgagctgagatcacgccactgcactccagcttgggcaacagagtgagactctgtctcaaaacaaacaaacaaaaaatcattaccctaatgcgggttattacaagttcctgatgcttcagacaattctccaatggccccagagtctgtcgtgccctttcccacaaggttaaaagtgacagcaggcctgtaatcccagcattttgggaggcc[225 bp omitted]tccgtctcaaaaaaacgaaaaacaaaacaaaaccaaacaaaaaaagtgacagcaggcagccagggcctcacagcccaaggtctagtcccaagggtctccatttagaagttgttggtttttattttaatgtgttggtttgaaagtcctggaggctgcaggttcttgcatctcagccctagaggagtaatgaagcttctccagggagaatgagaagctggaaacagcttcaagaaatcgggttactgaggcagggacaggcctgatgaaggctgggaggtgggagacccctgtctggcctatcccacctgccagtttatagattatgtgtgacagggggcagcacccaggagccgggctgaatcctttcagctaatggacatttatggcgtgcacagcaggtgcaaaggctctggggccacgtggagcatggactgttacagaaatggttacaggttcctgaattagcccattttcttttcgtctcagagcctcatttaccccatctgtgtaatggacataagagaacctatctttctaagttgtgtgcatatgttttcaccacgttcagactgtgtgtgtgtgtgtgtgtgttacctgtgtcctccccaaaacactttaacattcactcgtttttttccttggagacagggtctctctgtcacccaggttggattacagtggcacaatcacagctcactgcagcattgaactcttgggctcaagcaatcctcctgcctcagcctcctgggtagctaggaccacaggcatgtgccaccatgcctagctaatttttaatttttttttttagaggtggggtcttgtggtcaggcgtggtggctcgtgcctgtaatcccagcactttgggaagctgaggtgggcagatcacttgaggtcaggagttcgagaccagtctggacaacatggtaaaacctgtaatcccagctactcaggaggctgaggcaggagaatcacttgaacccaggaggctgaggttgcaatgagctgagatcctgccactgcaatcactccagcctgggcagcaaagcgacactcttttttttttttttaaagatggaatttcgctcttgtggcccaggctggagtgcaatggcacgatctcggctcactgcaacctccgcctcctgggttcaagcgattctcctggcttcaagtgattctcctggctcagcctcctgggtagctgggactatagacgcccgccaccacgcccggctaatttttgtattttcagtagaggcggggttt[141 bp omitted]ataattttaaaaagttagatggggtcttgctattgcccgggcttgtcatgaactcctggccacaagcaatcctcccctctcagcctcccaaagtgctggaattacaggcgtgagccactgtgcccagccccaatgttcacttttttaaaattaggtttactctctctcaccatttgaatgtcagctctacaaggacagcaatctgcgtgttctattcactactgaaactgcacagcctggcatacagtaggtgctcaatacttgtggaaatgcataagtgataacctccacagaacactaagtacaggctagagccgggcttcagcatttcctaggcatgcatttatttaattaccccaagaagccccgtgagaaaggtggtattagaggctgggcatggtggctcacacctataatcccagctatttgggaagctgaggtgggtggatcacctgaggtcaggagttcgagaccagcctggccaacatggcgaaaccccgtctctactaaaaattcagaaattagccaggtctggtggtcggtgcctgtaatcccagctacttgggaggctgaggcaggagaatcacttgaacccgggaggtggaggttgcagtaagctgagatcgcgccactgcactccagcctgggagacagcgagactcggtctcaaaaacaacaacaacaaaaaggtagtagtattaggatcccattttatagacgggaaaattgaggcatagagctgttagatttgagcccccccactcccctctcctccccccacccccgcccccccaccaccccgagtccagcccctgtgtgctaccacctctggctctggacctgtgggtttgtcaacacgtgttcttggcatgaccaggtgcaggaacatcacacataccaggagcttgcacgggtctggggtgggggccacatcagcctccggaacctgagcctgcagggcagcgcgtgccccagtcccgggggccacaggagggagcgcgtaggtagaggcggcgggtccaatctccacgccttgttccctctccgggagccggcttccctcccgcctgcctcggcctggacccggcccagctgctgacctcgggaactcgagtgcccccagggacgcagacaatcaattagaattggcagcgcctgcctaagtaaaaggcctgctttaatgaggaggctgtggctctgccgtgggcgcaggcgctgggctgagcccggcgcgggctggagctgaggggtcacgtggccaccagggcccacctgcctgtcacaattatgagtccccgtgtgtgagctcattatgtttatcattaggccagggctatttacagatcggggagagcagccccttgtcatgcaagccgcagacatttattgagcaccagctgtgtgctaggtcatgtgctgggttcgaggaaacagtagggacaagacgccctccagtgggggccaggggagacatcagggtgggcttcctggaggaggcaacacatacactgagattggaatgatgactcgaaattcg[144 bp omitted]caacatggtgaaaccccaaatctactaaaaatacaaaaattagctgggcgtggtagcgggtgcctgtgatcccaactactcgggaggctgaggcaggagaattgcttgaacccggaaggcggaggttgtggtgagccgagattgcgccattgcactccagtgtgggcaacagagcaaaactccatctcaaaaaaaagaaaaaagaatgagcgcagcctgggttgtggcggggggggctcctacctgtaatcccagtgctttgggaggctgaagtgggaggatcacttgaggccaggagttaaagaccaacctgggcaacatagtcagacccccatcacaaaaaaaataaaaaaattagccaggtgtggtggcgcacatctatagtccagctacttgggaggctgagatgggaggattgcttcagcccaggaggtcgaggctgtagtgagcaatgattgtgtctctgcactccagcctgggtggcagagtgagaccccatctcaaaacaaaaaattgaattagttcccgtgtacgggttgttcaaagcaagataacacagcaaaggaccatgaagcctgcagatgaatttcatctcgaggtcctgaatcaattacatctgcaaagaccctatttccaaaaaagctcatattctgaggttctgggtgtgtataatttttttttttcagacagggtctcactctgttgcccaggctggagtgcagtggtgtgatctcggctcactgcagcctttacctccccggttgacgtgattctcctgcctcagcctcctgagtagctaggattacaggcagctgccaccatgcccggctaatttttgtatttgtatttttattacttatgatctttttcctgagaccaagtctcactctgccacccaggctggagtgcagttgtgtgatcttggcttactgcaacctctgccttctgggttcaagcggttctcctgtctc[131 bp omitted]cctcggcctcccaaagtgctgagattattacaggtgtgagccaccgtgcccgacctatttatttatttatttttgagacgcagtctcgctcgtcacgaggctggggtgcagtggcgcgatcttggctcactgcaacctctgcctcctgggttcaaatgattcccctgcctcagccttctgagtagcttggactacagccgtgtgtcaccatgcctggctaatatatattttttttttttgtattttagtagagacaagattt[132 bp omitted]tttgagatggagtttcactcttgttgcctaggctggagtgcagtggcacaatctcagctcactgcaacctctgcctcccaggttcaagtgattcccctgcctc[134 bp omitted]catcctcccaa[160 bp omitted]gattctcctgcctc[184 bp omitted]agtgtatgtaatttttgaatttatttttgcaggcaggcactactcaacatggtacaatgtgtgcttgttcctatctgcctcctgctctggaatgtcaactccaggagggcagacttctgtctgtcttgaatgccacagtgtcccctgtacctcaaatactgtttggcacacagtaggcactcaatacgtgtttgtttattccgcaaacaactatgaagcacccactgtgttgttctcacacggaggtggagtttttcatgctccgaggacttggggcagagagaaggacaagtaggagccacggtgactgcgacttccttttttttttctgcagcctcaggtgccagcagcaataacacaggacctctaggcagaggaagggaagaggcgctgagggaggcagggcttctgcggcggggaggggggggcagagcccctggggatcaggccagggaggcgggagtcctgctggagtccctggggtccccagcagagaggctggctggctgccctgccctggcctggctgctttttctggcttggacgggaagggctgacaccgccagaggagggcagggtggaggcggggagggggcccgcacctggacccaggaagaggtgggggaaagaagtggagcctgggaaggggagacagaggaggtgaggagagaaagagagaaaccaagagagatagaaagagacccacacagagaagctgagctggagtcagacagataaaagacacggagagactcacgcagaaggtggcaaagacagaaacacagagagatggacagagacagtcagagataaagggagactcagagagacagaggagacccacagagatacagactcagagagatagagagacacagacctagagagagagagaacaacagagacagagatagaaagagatagtcagagataaaaggagactcagagagatggagaattagccgggcgtggtggcgggcgcctgtgatcccagctactcgggaggctgaggcaggagaatcgcttgaacccgggaggcagaggttgcagtgaaccgagattgcaccactgcactccagcctgggagacagagggagactgtccccccgccaaaaaagagagagagagagagagacaaagagacttagagagagagagagagggaaagaaagacagggataaaagtagattcaaagagacagagagaaaacaagagaaaggagaccaatagagatcaaaagaggtagtcagagataaaaagagactcagagagacctagagacagagaaagacagagacagagacttagaaagagaatggggaagaaacagagagatagaggcaggcgagaggctccctagcccatccccctccccaattttcctctctggggcacccctggggtctggggctctaaccctgtcctggtccccacccctccccctagctggtacttcagaccccctccacaaactggctgagtgcccccagtccctaactcagggtctcctcagctcagagctccggggctcagccctgagaccttctgggattcaggatccgaatgcccagtggagccagaatctgaatcccagaggcagggacaccattaatcctggaaagagggcaccccctccacccgggcctgagctgagagcggggaggctgtctatatgaagcccccacttcacacttcccacaggagagattcaccctgtttcacaggggaggaaactgaggcttggagaaagacgggattgtggagaggtacacgtttgttcatccagaaaatatgcactgagatgggcgcagtggctcatgcctgtaatcccaacactttgggagcccgaggtgggcagatcacctgaggtcaggagttcgagaccagcctgaccaacatgatgaaaccccgtctctacttaaaaatacaaaaattagccgggcgtggtggcgggcgcctgtaatcccagctactcaggaggctgagggaggaaaatcgcttgaacctgggaggcagaggttgcagtgagtggagatcacgccactgcactccagcctgggtgacagagtgagactccgtctcaaaaaaaagaaagagaaaaaaatgagagcgggaaagaaagaaagaatactgggtatcatataattgactcataaatatttcaatttttcaatttgtatctttttttttttttttgagacagagtttctctcttgttgcacaggctggcgtgcaatggcgcaatctcggctcactgcaacctccacttcctgggttcaagcagttctccttcctctaactgggattataggagtgcgctaccacgcctggctaattttgtatttttagtaaagacagggttttaccacattgatcaggctagtcttgagctcctgacctcaagtgattcacctgcctaggcctcccaaagagctggtattataggcatgaccaattggtatctttaaaagataaggaggactatgctgaaaattttaacaatggccacctgcagtggctcatgcctgtaatcccagcactttgagaggctgaggcaggtggatcactggaggccaagagttcgagaccaacctggccaacatggtgaaatgccatttctaataaaaatacaaaaattagctgggcgtggtggcaggggcctgtaatcccagctacatgggaggctgaggcaggacaatcatttgaaccagggaggcagaggttccagtgagccgagatcgtgccactgcactccagcctgggcaacagaatgagacggagtcttgctctgtcacccaggctggagtgcagtggcacgatcttaggtcactgcaagctctgcctcccaggttcacgccattctcctacctcagcctcctgagtagctgggactacaggcatatgcca[142 bp omitted]gccaacaataattttattctatcagcaaatatctcatcggcctcaaatttctatcaaaagtgtcataattttttttacagtttggagcatgatccaaatacagttcacacatgtatttggttgatatgtcttttttttttttttttttgagaccgagtcttgctctgtcacccaggctggagtgcggtggcgtgatctcggctcactgcaatctccacctcccgggttcacgccattctcctgcctc[135 bp omitted]gcctctcaaaatgctgggattacaggcgtgagccaccgtgcctggctgcttgatatgtcttaaagtttcttttagcctataggttcctatccatcgctttctcttctttttttttttcgtgtaatttatttgctgatgatgcattattttattttaggtgtattcaaaagaacatacacatggattttgtttattctttgttgtttctatgtatgcaatctgacagcctatgtcttttaagcgatcagtttaattcatttatatttattgtgtttgccaacatatttggctttattttcatcactttctttgattgtattttatagttaatatgaattttttctgctgcttccttttcatcttctcttcaaccttctgctgaatttgccagattttctttgttccttctcttttttttttttttttgagacaagagtttcgctctttttgcccaggctagagtgcaatggcgtgatcttggctcactgaaacctctgcctcccaggttcaagcgattctccggcctcagcctcccaagtagctgggattacaggcgcccaccaccaagcctagttaattttatatttttagtagggattggggttttactacgttggccaggcttcaaactgtaaaaaaaattgggtctcaaactcctgacttcatgtgatccacccgccttgacctcccaaagtgctgggattacaggcatgagccaccgtgcccggcccaagcccagccaatttaatatttaaagtagagataggattttaccatgttggccaggctggtcttggactcctgaccccaggtgatctgtccgcctcggcctcccaaagtgctgagattgcaggtatgagccaccgagcctggccttctttgttcctttcttattccccctcatgatttggaagttatgcattccatttctgcctttgagtagtcacccttacactcttaccatgtatacttagcttacaataactggaagttaatcaacatctctttgttcctccgaatgagacaaggacttcagatgtgtacatactggagctttcctccactctgcatgtcacttttatcccatatttgagttctgccttggcacacctaaggatggagatgaggacagggggtggtgtgtgcccatgtgggtcaccattctcccagatggatggcagatgtggagatggattccagagaccctaactgtctgtgagttcaggcaggttctgcattgggcctcagtttccccatttgtaggacagcactgagtccctctagggctaatatctgaagactgtgagctcccaccctctcccttcttcccaccactcaggatgaccagagtgcaggggcctctggttacactgcagataatgaggggcctctgtcgctaggcccaccacaaaatgagcttgcaggagaacgcgacagctaatgtcattatttacttcactgagctaaataatctagggaattgctcatcaggacctgataatttgattggatttcatgcacaattaggtcttcagagctgaggcattagtcggcgagttcaggaaagacaccaacctccctgctggagaggctcaaggtaaggggacaacgacggagatccccagccccaggaaagggtcaggcgtgcaggccagagggaggcctgaattggccaaattcagtggatccagcctaggctggagctggagacccaccagtcatagtcaacttgacattgcttacttacgagttggttgatattagcagaattattattattattattattatttgagatggagtcttgctcttttgcccaagctggagtgcagtggcgcgatcttggctcagtgcaatctccgccttctggattcaagcgattctcctgcctcagcctcccgggtcgctgggattacaggcacccgccaccatgcctggccaggagaatgatatcacgggagaaacaaccatagtgaacacagttaggtttggtcacttttgcttgagatgtttatttttcttcttacatgaaagaattcaagatgaccccttaaaatctaagtcagggccaggctcagtggctcacatctgtaatcccgacactttgggaggccgaggagggtggatcacctgaggtcaggaatttgagaccagcctggccaacatggtgaaaccccatctctactaaaaaatacaaaacttagccaggcaaggtggcaggcgcttataaccccagctaccctggaggctgaggcaggagaatcgcttgaacctgggaggcagtggtggcagtgagccaagatcatgccactgcattccagcctgggtgacagagtgagactccatttcaagcagaagaagaaaaaaatctaagtcagatctgtccttctcctgcctacagccctctggctcccacctccctccaggtcaaagctcaagtcctcccagaggcccaccaggctctttacaacctttcctgcccccttcctgccctcccctcctccctctcttcgcctcgttcactctgccccagccagacgggcctcttcactgtccctccaacaccaatacaccaggtgcggtcctgctccagggcctttgcatgggatgcaccctcttcccagaacagctgtgcccccagatcccctcagagttgtctcattttcctgttctaggtctcagcttaaacgtcacctcctcagagaagccattcctggctaaaataacttcatccccaccatttgctatgacgtcatcttgttaaattattacctaggctcagcaccccaatccaaaaatccaaaatccaaaatccaacatgctccaattgaaaatgctttgaccgacgagttaatgggtgcagcacaccagcatggcacatgtatacatatgtaactaacctgcacattgtgcacatgtaccctaaaacttaaagtataataataatttaaaaaaaaaaaaagagaaaatgctttgaccgccgacatggcactcaaaggtaataaggctccttgcagcatttcagattttggattttcagattagggatgctcagctggcaagtataatgaaaatattctgaaatccgaaaaaatccccaatccaaaacacttcttcaccatggaaaaatgcttctgttccaaaggtttttttttcttttttctttttttttttttttttttgagacggagtcttgctctcgcccaggctggagtgcagtggcgccatctcggttcactgcaagctccgcctcccgggttcacgccattctcctgcctc[221 bp omitted]tgtcccccaagccggaacgcaatgacgcaatcttgactcacttcaacctccgtctcctgggttcaagtgagtctcatgcctcagactcccaagtagctgggattacaggtatgcgtcagcacccctagctaattttttttttttttttttgagacggaatctcgctctgtcacccaggctggagtgcgatggtgtgatttcggctcactgcaacctctgcctcctgggttcaagcgattctcttgcctcagcctcccaggtagctgggattacaggtgcccaccaccatgcccagctaattttttgtatttttagtagagacggggttttgccatgttggccaggctggtcttgaactcctgacctcaggtgatccacccgcctcgtcctcccaaagtgctgggattacaggtgtgcgccaccatacttttgtatttttagtggagatggggtttcaccatgttggccaggctagtctcgaactcccaacttcaggtgatctgcctgcctcagactcccaaagtgctaggattacaggcatgagccactgcatccagccatcccaagcattttggataagggattctcagcctgttttatcccagggaccagtgtctggtgcccccactctcttcccaactctgagctccccaggattgtccctctgtcccagccctgacccctcagtcagtgtccagctgtgtccagttttacttctccacagcctggtggctcctcatgagccaaaccaagacggaggactctctgggccccaatgcctgtattttggggtacatgaccctggaggcctttcctgcgtcatctccatcctatcccctccacagcacccattccaacatgagccacaggacaatcttgccatgtccaagtgcactgactttatttcacccccacccggcctttgcccatgctggtccctgtaccagaaacgcttttccccaaagccttttcttcctggcaatcaattgccttcaatagctttgcttccagctcctctttctgagcccctctggccactgcccacccagttctgggtttcttccaccccagcctgaacatgaggggctgtggggtggactctgggagaccccgaggctccagcactggccaagactggcccgaataccccatgatgcctgctaaaagaacccccaaaagctactcaggcgattatgatccgaacagcactctgagtgtctagggctggccacatctctctccctctctcccagttctccatgatgatctctccgtctctccttatctctgtgtgtatctctgggtctctacacgtctctctgtgtctacatctccctctctccctctctctctccctctcccccctttctccctccgtttctctttctctctccctcctctttccttccccctctctttctctctctcccctttctcattctctctttccccctctctccccgccctttctcattcttctctctctctccccagccctctctttctctgtcttcccccgaccccccacctgggtctctctgcttctgtatctttttgtctctgctcctcccatggggcaccagcttcacccaccaccttcttccccacccctccctcttctccactttctcccttccccacgccactgtggatctggcactggctgggcacagggggatggtctggccttcctcccccacctctcctgtctctgcctctcctctgactcagcctctcctctgtctctgcctctcctctgactcggcctctcctctgtctctgcctctcctctgcctctccctctcctctgtctctgcctctcctctgtctctccctctcctctgtctctgcctctcctctgtctctccctctcctctgtctctccctctcctctgtctctgcctctcctctgtctctgcctctcctctgtctctccctctcctctgtctctgcctctcctctgtctctccctctcctctgtctctccctctcctctgtctctgcctctcctctgtctctgcctctcctctgtctctccctctcctctgtctctgcctcccctctgtctctccctcttctctgtctctgcctctcctctgtctctccctctcctctgtctctgcctctcctctgtctctccctctcctctgtctctgcctctcctctgtctctgcctctcctctgtctctgcctctcctctgtctctgcctctcctctgtctctccctctcctctgtctctgcctctcctctgtctctccctctcctctgtctctgcgtctcctcagtctctccctctcctctgtctctccctctcctctgtctctgcgtctcctgtctctgcctctcctctgtctctccctctcctctgtctctgcctctcctctgtctctgcctctcctctgtctctccctctcctctgtctctccctctcctctgtctctgcgtctcctctgtctctgcctctcctctgtctctccctctcctctgtctctgcctctcctctgtctctgcctctcctctgtctctccctctcctctgtctctccctctcctctgtctctgcgtctcctctgtctctgcctctcctctgtctctccctctcctctgtctctgcctctcctctgtctctgcctctcctctgtctctccctctcctctgtctctgcctctcctctgtctctgcgtctcctctgactccgcctctcctctgtctctgcgtctcctcagtctctccctctcctctatctctccctctcctctgtctctccctctcctctgtctctgacgttctatttccgtctcgcaggctctgggtgcacatctcccccggggctgccaacctctgggctccacactccccactctcctgcggcacccccctctctgctacttccagatcccccacctgctcctgcctcccaggtactgaggcagagacgggagatggagtttatgagtttttttgaggcggggtctcgctctgtcgtccaggctggagcgcctcatagtggtgcgattatagctcactgcagcctcgaactcctgggctctagcaatcctcctgcctcagcctcctgagtaaatgagactacagttgcctgctaccatgccagctaatttttaaattttctgtagagatgggatctcgttacatagcccaggctggttttgaactcctggcctcaaggggtcttcccgcctcagcctcccaaagcgttgggattcaggcgtgtgccagaacacctggcccagggagatggaattcaaatggattttaaggcttcaccttctccctggctggctggggaggaacagagagggaaaggggcctccccgaggtcacacagcacctggcctgggaccccctgcggctttgagtgggagtccccacagggctccggatttgagttcagcagcccaacccttgctgtgcgattgggggcagtcaactctgcatctcggagcctcagtgtcctcctctgtgtagcaacaatggctgtgccacctccatgggtgacagtgaagccagccaacatagggaaggtgcttctgactttagaacatgggaaattggaagcatgggaactactatagacatctattcccattcccaggaggtggccgggcgctgtggctcactcccagcactttgggaagctgaggcgggtggtgaaaccccatctctactaaaaatacaaaattagctgggtatggtggcacatgcctgtaatcccagctactcggggagccgaggcgggagactcacttgaacctgggaggcgaaggttgcaatgagctgagatcgtgccactgcactgcagcctgggcaacagagtaagactctgtctcaaaaaaaaattatatatatatattcccaggaggcggaatgggaggatgggaggtggggaggggccagctttgtgtgagaccctcatccagagggcaaatttgttctgagagagtgcccaggggtgcacagacttggggtgaggcggctgggaagagcttgtctgtttcaccaagaaataagtgtgaatgcagggagatgggggtggaggagagcactggggttgcctagcaacagagatgaagctgacagacaggatccagacctgctgtccagggtctggggggtttcaagaaaggggggtgctgatatttgggatcttgtgtttttctggctgagaaggtatccccaccatggccctccaaacttcagcagagttgaccccagactcaggggtcttagggaccccggagcctagaacagagagattcagtggtagccggagattcatgtactcgggaaagaagcagtggagacaaaagcagactcggccccctttccagccccggccctgacagttgcagagatgttgatggctgaggagaaccggattgccatttatgaacttctctctctctctttttttttttttctgtgacttgagttttgctcttgtcgcccaggctggagtgcaatagtgtggtctcggctcactgcaacctccgcctcctgggttcaagtgattttccagcctcagcctcctgagtagctgggattgcacgtgcccgccaccacgcctggctaatttttatatttttagtagagacggggtttcaccatgttggccagtctggtctcgaaatcctgacctcaagtgatccccccgcctcagccttccaaagtgctgggattacaggtgtgagcccccgtgcccagtctatgaactcctttttaaggagggagtcatggtggccaagaaggatgcccacctgcctaagcacccagagctggcagacaggaatgtgcccaacctacacgtcataaaggccaaacagtctctcagatcatgagg[139 bp omitted]cctcagcctcctgagtagctgggattacaggcacccaccaccatgcctggctaatttttgtatgtttagtagaggaggggtttcaccatgttggtcaggctggtctcgaactcctgaccttgtgatccgcccgcctcagcctcccaaagtgctagaattacaggcgtgagccaccatgcctggccaactggagacgtttctactggtaccttaccaatgagggtatctagtgtctccatgatgacctccagctgccctcagagagtgtgcctgccactctatgccgcagccgtccagagactggtagaccttggcctaaacgtctggagggtgagtgccctccaagactcccaagaggggaagctgacagagacccacaggtggggcgctgtgccccctggtgctggccaggaagccaaggctggggctgggccagcaaccgaattccagtttagaggtggatttggtggtggacatggtcagccacctcggtaaaattggagaggattagtttgcactgaataaacttacagccagaaaaacaaacaaacaaacaaaaaacagacttggccctgtcttcctggcagttccagcctcatggctggaaacatatataattgtttgttttgagacagagtctcactctgtcactcaggctggagtgcagtggtgcaatctctttgctcactgcaaccttcacctcctgggttcaagggattctcctgcctc[134 bp omitted]tggcttcccaaagtgctgggtttacaggtgtgagccacctcgcctggtcggattctagattttagattggccagtttggtcccagctgttgggggcgggactggagaaggtgggagaggctggggaagagcccttgggcagaggggagggaaggatggagacgaggcaggaggtgggacctatgtagagggcagggcaggaggtgagtttgatgcctgcctggggctggggccttggaccttcccctctaggcagccctgcctctgaagctgtttctgagttttctgccttccccatcctctgaattcccctgtctctccccgcctcgctccctctgctgcccgtgatgaagaatggaattatatttttataacttcttgtttttcctgaaccaagttccatgtgcactgggctaaatttaaaaagcggatggatggagagatgatcatgttcactttcactcccttggaaaaaaataaacgccttgattcaggtgccatttccctcggggacactgggggcggggtggtggcctttctgctcacagtgacagggctggacagagataagtcagacctggattccagctgcctccttccggaagccttgcctgacctgtgcctgaaccaggcccacccctcagatcttctgacaccctgggcatcccccaaaacagccctggtcaccctgtgc[144 bp omitted]ctcccagattcaagcaattctcctgcctcagcctacctagtagctgggattacaggcgcgcaccactacacccatcctttgccatctttagggctagcttctcaacctttagggcttagctccaatgttacctcctccaggaagccctcccggaccgccctgactaaagaagctacgaagttgttttctatcacatcatcatcataatcttctttttttttatgagacagggtcccctgtcgcccaggctggagtgcagtggcatgatcacagctcactacagccttgaactcctggactcaagcaatcctcttgcctcagcttcccccgtagctggaacgtagctagcacaccaccatacctggtgcttgtattttctttttttttttttttgagacggagtttcgcttttgtttcccaggctggagtgcaatggcatgatctccggttcactgcaagctccgcctcccggattcaagccattctcctgcctcagcctcccgagtagctgggattacaggcatgtgccaccacacctggctaattttgtatttttagcagagatggggtttctccgtgtgggtcagggtggtctcgaactcccaacctcaggtgatccacccacttcggcctcccaaagtgctgggattccaggcgtgagccaccgcacccagcgcttgtattttctttagaacattttttatcacccggaattctcttaggctaatatttgtaatttgttaagcacagttaagggaactggatctggactgcctaacccctcccaagtcccaactacaggctggcccctgccagcctgtccctgtagccttcattttcactctccctgcattattcagtcaccactcagcaaacatgttttaagtggctactgcactagaccgtgtatctcatggctcctagtcctgccctggtgcttacaatcacccagggagtttcaaattccaaccaacaccttccatccctcccctccactggagattatgaatgaatcggtctagagctgggggctgggaaaaggattcaagtgtgccctcaggacatagaacaattgctgtaggttttgttttttcctttttttttttttttttttttttgaggcagcgtctcactctgtcgcccaggctgcagtgcagtggtgtgatttcggctcactgcaacctccgcctcccaggctcaagtgattctcctgccgcagcctcctgagtagtagctgggattacaggtgcatgccaccacgcctggctaagttttgtattttaagtagagatgggtttcaccatgttggccaggctggtcttgaactcctgatctcaggcgttcctcccaccttggcctcccaaagtgctaggatgacaggcatgagccaacatgcccagcctctgcaataggttttcttatctcccaaaggccgtgctcactgctgcccccaagcctttgctgaagctggtccctctgctggaacacactcctgcttcctctccacctatttaaatcctccataactttctttgttataaacattttttttttctaattttgaggaaagtaaaaaggaaagacaagtgcaaagacaaatatagcaagcacctgtgtttcctccacacaggaccagcggtgcttaacccttctcatgtttgcttcaggcctgttttgttttgtaagtaagaatggaaatactggaagtcaaggtacagtggcctttgacctcctccagtcacgcatttttctacattcttatgtgtataaactctcacccatccatgaacgtgactagtgtaattttgcacactaaaaataaatcttaatattctcataaggtacatatcatcctgcaatttgctcttttcactcaatattttattttattaattttttaaatatttattttatttatttatggatttattttgagatggagtttcattcgtgttgcccaggctggagtgcaatggtgcaatctcggctcaccgcgacctccgactcccgggttcaagtgattctcccgcctcagcctcctgagtagctgggattacaggtacacgccaccactcctgactaatttttttgtatttttagtagaggtggggttcc[132 bp omitted]gttttggttttggttttagagatgcagtcttcctatgctgcccaggctggagtgcagtggctattcacaaacacaatcatggcacaccacagcctcgaactcctggcctcaagtgatcctcctgcctcggcctcccaactagctgggactaccactgcaccccgctctattcctggtttttaatattacaaaaggtgctactatgaaaagtcttttcctctctctttatgcacttggcaaagtatttctctaagaactatgactagaaatggaatcactggaacattggatgtgtgcgtggtttacctgactatttaatgcccaagtgctttctaggattaagctacaaccggtaactgtggaagctccccttcttccattttttttttttttgagacggagtctcaatctgtcgcccaggatggagtgcagtggtgcgatctcggctcactgcaagctccgcctcccgggttcacgccattctcctgcctc[224 bp omitted]tgtgcaatggtgcaatcttggctccctgcaacctccgcctctcaggttcaggtgattctcctacttc[134 bp omitted]cggcctcccaaagtgcggggattacagatgtcagccatttcacctggccgtctcccatggttttgctgatacttgaaaccttgagtttttcaggctttctcttcaaatctcccccagtctattgtggcctttttggaccctccaggctcctgggttttgccacagggccacctcactgcactcatggtgctaggcaccctcgcctgcagtgcaccatcgctacccagtttgagcatgaaagaaccaactgtctctggcttcagactcttaacaattggaagtggaacctgccaggcactgcggctcatgcctgtaatgccagtactttgggaggcggaggcaggaggttctcttgaggccaggagtttgagaccatcctgggcaacgcagcaagactcccgtctctatgacaaatatataataaaataataaattgggagtgactctcaggtcctagcgctttccccccatagctattccagaaattccaagatcttacacattacgcagaaaaggcgcttatcaacattcttttgccagtcattaaaacaaccactcccacgataacaacaaaaaagaaaaagtggccgggtccggtggctcacgcctgtaatcccagcaccttgggaggccgaggtgggcggatcacttgaggccaggagttcaagaccagcctggccaacgtgatgaaaccccgtctccactaaagatacaaaaattagctggacatgttggcacatgcttgtaatcccagctactcaggaggctgaggtaggagaatcgcttgaacccgagaggcagaggttgcagtgagcagagattgtgccactgcactccagcctcggtgacagaat[258 bp omitted]gcttgcagtgagctgagattgcgccactgcactctagcctgggcgacagagcgagactccatctcaaaaaaaaaaaaaaaaaaaaggaaaattactacccaggctcattgacaagtgcaatattacagcttcaggtatggttggatccaggaacttgactcatgacattagcaatttttctcttgccatctctcaactctgctttcttctgggctggcttctcccagcctcacccccgaggtgggctcccctttcttagtggcaaggatgcccctcagtggctccaaattccatcctcccagctctatatcctgcgggtagggacacagagcctcctcttctcattctcactggctcagtcctgaaccaatcatagcaacccccagaagaggtagtgctctgattggccaggacagctgggggagggtggagtcagctaactactgagaccagaagtggggaaagggctgctccccaaggaaaattggggttgctggttgctaaggaagagagtcggcaaaaccaactgtgattgccactaggaaactcaaggcaaagaattctcaaattctttttttttttttttgagacagagtcttactctgtcacccaggctggagtacagcggcgtggtctctgctcactgccacctccgcctcccgggttcaagtgattcttctacctcagcctcccaagtagctaggattacaggcgtgcaccaccatgcctggctaattttttttttttttttttttttttttgtatttttagtagaggaaggggtttcaccatgttggccaggctggtcttgaactcctgacctcagatgatccgcccacctcggcctcccaaattgctggaataacaggcatgagccaccgcacctggcctccttggggttctgagttctcttacgctaaaatcaaggtgactgcaggattgcattccttctggaggctctagaggagaactactttccttgcttttccagcttctagaggcttcatttttaatttaatttaattttatgttgtagagactggggtctctctatgttggccaggctggtcttgaactcctgacctcaaaggatcctcctgccttggctttccaaagtgcagggattacaggcatgagccaccatgtccagtcttcagaggcttcttggattccttggctcatggccccttcctccatctccaagccagcaagggctgatggagtctttctcaagctacctcaccctggttgttcctattatcgatcaggtctacttctctgaacctggccttcctgcttccttctttttttttttttttttttgacagagtctccagagtcttgctgtcttgcccaggctggagtgcagtggcgtgacctcagctcactgcaacctccgccttctgggttcaagcgattcttctgcctcagtctcccgagt[137 bp omitted]gcctcccaaagtgctgggattataggcatgagccactgcgccgggccccatcttttcttttttggttaggtttggtttgttttttggagacggagtctcactctgtcactcaggctggagtgcagtggggcaatctcggctcaccgcaacctccacctcccgagcacaagtgattctcccgcctcagcctccagagcagctaggattacaggtgcccaccaccacacctggctaatttttgtatttttagtagagacagggtttcaccatgttgggcaggcttggttcaaactcctgacctcaggtgatccaccctcctcggcctcccaaagtgctgggattataggcatgagccactgcgcccagcctccttcttccttcttataagcaccctgtgattgcactgggtttatccagataatccaggatcatctcctcatctcaagatccttaatgtaatcccatttgcaaagtgctttttgccaactgaagtaccatatgcataggatttgggaattaggatgtggacatctttggacggggaggtgtcaatattcttccaagcacaatgggccataaagaggaacagacatgggtgcatttgtttatttcacaaacatttattgagcacctactgtgtactcacctgttctaggtcctgagaacacagcagaaaacaagacaggccagatacagtggctcaagcctataatctcagctctttgggaggcagaggtgggcagatcactagaggtcaggagttgaagaccagcctggccaacatggtgaagccccgtctctactaaaaatataaaaattagccgggtatggtggcaggcacctgtaatgccagctacttgggaggctgaggcaggaggatcgcttgaacccaggtggcagaagttgcagtgagatcatgccactgcactccagcctgggcaacaaagcgaggctctgtgtcaaaaaaaaaaaaaaaaaaaataggccatgcgtggcgactcacacctggaatcctagcactttgggaggccaagggaagaggatcacctgaggtcaggagtttgagaccagcctggccaacatggcaaaaccccatctctactaaaaatacaaaaattggccgggtgtggtggctcacacctgtaatcccagcactttgggagccaaggcgggtggatcatctgaggtcaggagtttgagaccagcctggccaacatggtgaaaccccatctctactaaaaatacaaaaattagctgggtgtggtaggcgcctgtaatcccagctgctcgggaggctgaggcaggagaatcgcttgaacctgggaggcggaggttgcagcgagcggagattgtgccattgcactccagcctggacaataagagcaagactctatctcaaaaaaatatataaataaacaataaataaaaatacaaaaattagccgggcgcagtggtgcgcacctgtaatcccagctgttcagaaggctgaggcaggagaatcacttgaacctgggaggcagaggttgcagtgatcagagatcacgccactgcactccagcctgggcgacagagtgtgaccccgtctcaaataaataaataaataaacaaataaaaaagaaataaataaattacccaatctcagggacgttctttatagcagtgtgagaacagaccaatacattcagactgcagtgagccgtgatggcaccactgcattttaacctgggtgacagaatgagaccctgtctctaaaaaaaaaataaataataatccttttttttttaaatcacaaaggtgaaaggaaaatcagcttctctcaccatagattgaaggtaactgaaaatataatttagtctgattgacttaaatggatcccgtagtgacggaaggaatgacaggtgggagagacttaacaaccactccctcgacccctcgcccctggcaggacccacttgagacttgagaaagacagaacagatattcaaaggggtcactgtgcaactgggcttccaggttatttcataccacgccaaacactctctgaagtcatattttgttttgttttttgtttgttgttggttttgagatggagtttcgctcttgttgcccaggctggagtgcagtggcgtgatctctgatcactgcaacctctgcctcccaggttcaagtgattctcctgcctcagccttctgaacagctgggattacaggtgcgcaccactgcgcccggctaatttttgtatttttatttattgtttatttatatatttttttgagatagagtcttgctcttattgtccaggctggagtgcaatggcacaatctccgctcgctgcaacctccgcctcccaggttcaagcgattctcctgc[134 bp omitted]gcctcccaaagtgctgggattacagtcgtgagccaccgtgaccgggtaatttataaaggaaagaggtttaattgacttggttcctcatggctggggaagcctcaggaaatttacaatcatggtgggacaggaagcagccttcttcacaagacggctggacaaaggagaaacttcaaacacttataaaaccatcagatctcatgacaacttactcgctatcaggagaagagcatgggggaaactgcccccatgatccaatcacctccctccctcaacacgtggggattacaattcaagatgagatttgggtgaggacacagaagcaaaccagatcactgggccttccaggctcaagtgatcctcccacctcggcctcctgagtagctgggaccacaggtgtgcaccaccacatctggctaatctttgcattttttttttttttttttgtagagatggagtctttttatgttacccagactggtctggaactcctggcctcaagtgatcctcccggcctcaagtgatcctcccgcttcagcctcccaaagagctgggattacaggcaagagccaccgtgcccggctaaaaaagatttttaaaatacattgactgatatttcagatgtgaggtttaaaggaaaatagataactgtggatatggggaaatggaagaaaagatgagaagccattggcacggatttgggaagcattacctgtctcttacacatggggaaacagaggccccgccatgaccatgactcaccaggtgggctgaaggtctttcttcaggaggagagctgaagggagctagaaaagttttcatcggttggctgcaggggctcacgcctgtaatcccagcaccttgggaggctgaggcaggtggatcacttgagctcaggagtttgagaccagcctggccaacatggtgaaacccatctctactaaaaatacaaaaattagcttgatgtggtggcatgcacctgtaatcccagctactcgggaggctgaggaagaggaaggagaatcgcttgaacccgggaggcagaggctgcagtgagccgagatcacgccattgtactccagcctgggcgacagagcaaaactccatcttaaaaaaaaaaaaaaaaaaaaaaagagcgtttcattagcattcccctatccctctgtgagtggttttctccctctcccttgctcatcccgagctgattagagcaagtgctctatgaagatctccagggaacagcatcccaggctatgggcaccatgcatgcaaaggccctggggcaggaccacacctggcatgttggaggaatagcaaggaggcccatgtggctggaatagagtgagctaggggtagagagggaggaggggaggggaaggaggggacgggacaggtcgtgcgggccgtcatgggctgcaggaaggacttgggtcttgaccttgagggaggtgggagccatagagggctgtggacagaggaggaacaggacctgagtcaggtgctcacaggcaccctctagtggctttgcagagaatgcactgaagaggcagggcagtggccaaggagagaccagtccagctctcagcacatgctgtgtgtctccggggcaagggaagtcactctatgggctcattttccttatcagctaaaaggggaactttaacagcaggcagagactcagaaaatgagcagaaggagctcgctgcctgagattcaggccaggcgtggggctgctgagttaatacttttaacaggtcaggattctgctcaccacactccgggaggtgggaagatgaggtcagccacacccccagctcaggctctgatgaagtcatcgtgacagatgggtaagtgtgaggacagctgtgggaatatttcccacctgtgccctgtgcctcctgcaaagatgtagatgagcaaatcaaccggcatttcacagtcagacacagctctcagcacaccgcgctgtctaggagcccttcctgcaggaagccctcccggattgcctgggccctgtggggtctccctggaagctgtggcaggggtggggggcatttcagggagataaggagcagagaggctggctagaccgagccatggtgaggaaagacagggcggacgacagaagtgctccacgggtgaagggacatgctgggccatcagccacataagtctgatttgaatcctgacccagattcccacttgctttgtggacaagtctgctcccttcctgggctttgttttctcaaccacaaattgagaaaagaaatctcatttgattgcttaacactcatttaagtgagcacctactgtgtgccaggccctgttttgggcaccaggaacatggcaggagaaaaatgggcccagacctgctcttccaggaccctcagtccagtagaggacctgaatgtatcaccgagctgttaaaatacaaggtgttagggctgggcgcagaggctcatgtctgtaatcccagcaccttgggaggctgaggcaggtggatcacttgaggccaggagttcaagaccagcctggacaacatagtcagactccaccaagacgggggttggggggggagagagagagaggagaggagagagagagaggagagaggagggagagagggagagggagagagagagaaagagagagagagagaaatgtccttgcctagtctagaggggcttcaggcacagtttgatcaaggggccccagtattcagtctccttcccggacttagctctgttctcctcccctggcttctgccacaaggcagatctcataccagtccttagcagatcccagctggtatttccccaggctggtgctgcctcctctgtagttctggactaagccccggggctggctctcatcagcccacactgagtcatgtcctgtagcagctgctcagaaccacagacatatctccctgttttggggcgttctctctgcccagagctaaggttcctgggagtagtcctttgtcaacgctggttgaacatgaggggataaataccctagcttttctgatctctgggtgcggcgattctcagctgttttctttctttttccttttctttttcttttttttttttttcagacagagtcttgctttgtcacccagactggagtcctgtggcacaatctcggctcactgcaacctcccaggttcaacctcccaggttcagatgattctcctgccttagcctcctaagtagctgaaaccacaggccctcaccaccacgcctggctaatttttgtattttctgtagaggtggggtttcaccatgttggccaggctggtctcgaactgacctcaagtgatttgcccgccttggcctcccaaagtcctgggattacaggcgtgagccaccgcgcccggctgccggtgtcttattgaggccatcagacaatgcaagagtgctgagtcccagcaccctgtccttgcagttttacaaatctctgaatctgctacgatcactgcatccatcttccagatgcagtcactgaggttccaaaaagtgaagtttcctttcctgcccgggatgactaaggacgctctatccccaggggcagcagaagatcgggctgccctctccccaaacacacccacccacccacccacaggggcacacacgggcacacacgcaccgtctacctccccagacacccggctgacacaggctggcgtctgcacggctgacacttgtaaatccaccctccttcgggggcaggctggctccttctctggcagcaggaagatagagggagttggtttagtggttggggggaaaggagtgcgcccctgaccccatgcccagcccccgaccccagggagggtgacagcccctccctctcttccagtgaccttgggaaagttccaggaggcccccgggcctggactttgagaggtgagcgctccagcaagattcgctcccctccttctgtccctgctctgggcccgcccacccactccctttctcaagcggccttggaaagggtcttgcagagacagacagatggcctggggacagatggcggacgtgtaggagttaccactgggagaggggtaagggggaggggagtgcgttctggcccccaagacgagtcccacaggctcctgcagaacagaataagccgcctccttcaagcccctcaactgggatatcatcgtccccccgcaaccaggatcccatcaccccataaacggaatcccatcccccatcccaaccagggtctcatcatccccgcaaacggagtcccatcgaccccacattcaaggttccatagctcccccaaacgggatcccatggcactgggccggggcagaggcccggagaagagggtcgctagctgcaggttgcacagcccggcagggtgcgaggcctggcctgggggtgcgggtgactctggtgggtctaggctccgcggggagacttgggcctggagaccccgccccgcacgcagatcccgcccgccccggccgcgggttccggggaagcgaaggcgccgccagcccgggctgtgggcagagcgcgccctctgccgggcatgatcggaaacggcgcggcggcgactcccggaccctcgggactccggacccgactcccacccggctgagctttaccgggttatagagcccccaactctggatcgatccccgacctcctaaggaaccgcgacactgggctgagctcccgccttgggctaaacctcaatcccagtagagctgggacctgggctgagaccccaactttggatagagcctctgatctgtctttgagccctggtcctgagccaagcctcaaactccaatagagtctccatcgacctgagctcccaactcagggctgagcccccctctaggctgaggtctgatacggaatagagcctgcgaccccttctaaatcccgactctgggctgagcctggaccctcgatagagtctccaactctaggctgaaccctaaccctgggctgcacccttactgtagacagagcccaatcccagcagaggccctattctcactaagccccatcacccagtaagcctgcattcccggccaagatcatccctcccccacccctaacacccactgaaccctagccctcccgagtcccaaccttcttatctgatacagaaaagagaccaggtgtggtggttcttgcctgtaatcccagcgctttgggaggcagaagcaggaggatcgcttgaggctaggagttcgagaccagcctgggcaacatagtgagacaccccctatctctatttaaaaaaataaaaattagccgagcttggtggtgcacacctgtgatttcagctacttgggaggctgaggcagaaggattgcttgaacccaggaagttgagactgcagtaagctgtgactgcaccactgcattccagcctgggtgacaaatcgagaccctgtctaaaaaaaaagaaagaaagaaaaaaggtgaaatcatgctaggctcagatgcctccagtcctcctgccctgatggggagacccccttgatgctggggttgcgagaggagctgtacacaccacaccaaagtcagacctaatcaggtcctaatcccatctctgcctcatctggctgtgtggcctggaacctatcccttcctccctctggggttccatttcgtcatctgtgaaatgggacagtcactcctgactctaccaccttgtgcctgtgtgacctcaggcaagttacttcctctctctgggcctcagtctcctcctccaaaatgaaataagaaggtgttttgttttgtttcttgaaacagagtctcgctctgtcgtccaggctggagtgcagtggcgcgatctcggctcactgcaacctctgcctcctgggttcaagtgattctcgtgccttagtctcccaagtagctgggactacaggcgtgcaccaccactcctggctaattttttcatatttttgctttattttttattttttgagatggactcttgctttgtagcccaggctggagtgcagtgccgcgatctcggctcactgcaatctctgcctctggggttcaagcaattctagcacctcagcctcccgagtagctgggactacaggcgtgcaccaccacgaccagctaattttttttttttgtatgttttattttttgagatggaattttgctctgtcgccccggctggagtgcagtggcccgatcttggctcactgcaacctctgcctccagagttcaagcgattcccctgcctcagcctcctgagtagctgggattacaggcatgtgccaccacacccggctaatttttgtatttttagtagagacggggttcca[131 bp omitted]tgaggcctgtgcctcggtcttcctgaatcccgtgtgcaggtcaggacacacaacaggccctcaacaatttgttgtctggcttcctggaggaagaagcagcgaggttgctatgggctccctaggccctagctgcaaccgggacccagagttgggctgcagggcggaaatggtgctgcaggggacctgggagcagctccagggcctggttcccaggactcacagctgcatcctccccgggggaccccagctggcgctgcgcagccgggaggctcctgtgtgtcctgcaggctcattcctacggaaatcgaggctggacctggggatcctctgatgaggtctccaggagccctccacctcaccccaaagattcatctatagccccacaaccctgggttagattcatcccttcttgtggcacagaactctgtatttttaaaattttaacttattttgatcttcttctttttctttctttctttttttttttttttttgtagagacagggtctccctaggttgcccaggctggtttcaaactcctgggctcaagggatcctcctgccttggcctcccaaagtgctgggattccaggcgtgaggcaccacacctagttggaatctgcattttaaaatggactctcagatctttctgacgcgaagggttccccgaggccgtactttgagaaacacgcttctgccgaaattcctattacccaggcgggtaaactagccccagaaggaggaaggggcccgtgcagaaccacgtggttggtctgttttgccttttggctctctggtctcttcctgttggtgtctctgtgcctccctccccaggttctctgtctgtctcgtactcttatctcttcccttttctgtggccggcacccccacgacggcctcgcccccgcatccgggccccttcgcgattccggaggaatcccccagagccgcctgaccccgcccccaggctccgccccttccccccacttcccccccgtcgcagtgccctgctcccattggccttttcgtacattgcccgccctgtcattggctaatccggagcgctcggcccgccccccaggcctggcaactctccggtcccttccgcgcgggcggggcgagtggagggcgtggcctgccgaggggcgaggcgagtggagggcggggccgcgctgcccgccccgccccggccccggccccggctccggcgctgctcccaccgccgcggcaacggccccggcccacggaggcggctggacggacccccgacggttggacgtacggactctgcttcgagagtaggtgagcgagcagtgccggggcgccccccatttcagcgcatctcgggggccacctggccgccctctgtctctcccgccccttaatgcttctgcaccccaccgcctgtccgtctacattcctgcctcagtttccgtctgtctctctgtcactctcgctgtataggttagggggagacagattgagtctcaattgccccccttggcgtggggctctgctctgggaccagcacccccatcccccatgtggactctagtggactctgccccctttaactgtagggccgcaggtgctcaggccagattccagaaccctgagggcattccaggcggtgggcagctgggccagccgtgcggaggtgggcatgactgtagcttctagctaaaccaggcatcggtccaggcatcggtggcggggagccaggcctaggccagcccgggcccacccagactggcccctaatgagctcccaagtggcctgtggggacttggcctcagttttgccagctgtgaactgggaccgtcgctgctaaggtaattggcaggtgatctgaaggacacctgccgcctcctggccttttctgtgaagtcgaactaggcccatttcctgggatgggaaactaaggcctagaaagaggccaatgcttccaatgtttgtccagggaagtggggacagaggcaggacagaatctgttttctctgcatcctcacatttcccagcaccttctctatggaggggggaagggctggtggaggagcagccccaggtgtaaacaggccgccagagtttatttcctgagccagtcccagctcagctggaggcgatgaacgccttgggaggccccaggggggccagcccagtggtggcggagcttggaccaatctaggtttgagctctgccacccgcatgatatcttgaaccagtttttcaattctgcggagcctcagtttcctcatctgtaaaacaggagtgggtcgtaactccccaagttgagggctgctgggggatcagatgcaggaatacaggccctgctcataacctgcctgactctcgctgtggctctgccccagtcacactggcctcctcctgtttctccaacaccccaggcgaggtcctctctcagggcctttgcatgggctgtgccctctgccactacggcaggtccgagggcgccaactttgaaacataacaagctccctggatgggccggacccaggacctgcacaggcaagggctgggaggggcagaggaggggccgctcagggacgctgtacctatggaaaccgtgaacaaagggctgtctccagccacacaaacacctgggtgaatcgggcactggccagaggctggagcagcctgggatacaggtggtgggtgagtgcctggacccctgcagggaatatggggccgggggggggacttgaaccctgctccaatggtggggtggctctgcagacgggtgcaggtctgaggccccgcggtacggcccctcccactgtgtggccttggaccgacggtcaggtgcccccagagcctcagtttcctcatccccgttcccccaggggtcagcccaggtgggtgaggggtcttttgattgcttgacaattcagtatggtgggttccggaggcctcagtgtccctgtctgtccaatggggccacgaaagggtgccttgaggacaaaactccagccgttgacaggggaacactcctcccagagagacgtcaacgctaaaaaatgactcacacttgcccaggtacagctcaggtgttacagacggggagcagggcaaggaggcagagcgagaggcaggaacggcccagttccacagcatgcctgccccttcccagcatctcccgacacccctcagcagatgacctccctggaatcacacccgctcgagctttgacgcagggacctctggcagagttcttgggatcttgtaaatccccagcttctaggcctcagtttccccatctgtccaatggggctggtcatctcctttttcttgtggggctgagataactgtggggagggagggtgctttgaggggtgggggagattcaacaagatattgttaaaagcccgaggaggggattacaggacacagtacttctagaagcttcctaaggcttcgatccttcccctctggggtgggctctgggagagacgagacttgaaccccaaatgtgccattgactaggatgaggaaaggattgcactaggttaaaggctgggttcaaattctgattctgccacatcactgctttataaacaggcaagctcctgaccctctgtgactcagtttccttataaccaaaaacttgcaggtccatctagagaatttcccagcctgggcaacatggtgaaaccctgtctctacttaaaacaaagaaaaaaaaattagccaggtgtggtgtcgcaggcctgtagtcccagccactctggaggctgaggtgggaggatcacctgagcccagggaggttgaggctgcagtgagccgagctcatgccactgcacttcagcctgggcga[136 bp omitted]gagggcaaaaccctgtctctactaaaaatacaaaaatgaggcgggcgtggtggtgggtgcctgtaatccagctactcaggaggctgaggcaggagaaacacttaaacccaagaggcagaggttgcagtgagccgagattgcaccactgctctccagcctgggttgacagagtgtgagactccatctcaaaaaaaaaaaaaaaattaaaaatatacacataaaataaataaaatagatgggggatctgggagggcttcctgaggaggggccatgtaaacccagacctggatgacaagaaggaaacagccatgtggagacctgggagaagagcagctcaggcagagggcacaggttgtgtaaaggccctggggcaagatggcgcctggcatggtagaggagcagcaaggaggcccgtggggctggagcagtgaggaggaggagagagggaggaggggagggcagggaggggacagggcagggtgcgcaggatcttatgggctgccaggaatacttggctttgaccccaagggaggtgggagccatggagggtggtgggcaggggaaggatggaacctgactcaggtactcacaggcacccattggctgctacagggaggacagacggggggcatggggatagatggtgctgagggacgaggggaccaggatggaggctgtgggggagataagaagtgggttgcgttaggccaggcagggtggctcatgtaatcccagcactttgggaggctgaggcaagtggatcacctgaggtcaggagttggagaccagcctgaccaacatggtgaaaccccatctctactaaaaatacaaaaattacccaggcatggtggcacgtgtctgtaataccagctactcaggaagctgaggcaggagaatcacctgaacccaggaggcggaggttgcagtgagccgagatcacgccgctgcactccagcctgggcaacagagtgagactctgtctcaaaaaaaaaaaaaaagtgggttgcattgggacacatttaggggctggatgcacctcctgccaggtgatcctaggcttctctgcactctaataatttattgcttgggctgaggcaagcctgtcccctcctctgcagagtcatgggctgtgggtagctgataattcatgtttggccctcgaaccctttctccagtggaaatctggccacagtggaaagtgtccaggctccccgccacaacccagcaggcagctggcccctgcccatccatggggtggtcctgagggtgctggggaacccagtttgagaacaactgatgtcacccccaacttgggccaacagattcccctctctcttttgccataactaaaatggacactggcgaagtatggcggctcatgcctgtaatcctagcattctgggaggccgaagcaggaggatcgcttgagcccaggaggagaccagcctggccaacatggcaaaaccccatctctactaaaaatacaaaacttagccaggcatggtggcaggtgcctgtaatcccagctatttgggaggctgaggcaggagaattgcttgaactggagaggtggaggttgcagtgggctgagatcgcgcaacagagcgagactccatctcaaaaaataaataaataataaaattggccgttcacggtggcttatgcctgtaatcccagcactttgggtggccgaggcgggtggatcacctgaggtcaggaattcgagaccagcctgaccaacatggagaaaaccccgtctctactaaaaatacaaaattaaccgggcgtggtggcgcatgcctgtaatcccagctacttgggaggctgaggcaggagaatcacttgaacccaggaggcagaggttgcagtgagctgagatcatgccattgcactccagcctgggcaacaagagtgaaactccgtctcaaaaaaataaaataaaaataaaataaaatggacactggccaagtgtggcagctcacgcctgcaatcccagcactttgggaggtcaaggcgggaggatcacttgagcccaggagttcgagactagcctgggcaacatagcaagacgccatgtctaccaaaaaaaaaaaaaaaaaattaaccaggcatggtggcacatacctgtagtcccagctactcaggaggctgaggtgggaggatcacttgagcccaggaggtcgaggctatagtgagctataatggtaccactgcactccagcctgggcaacagagtaagaccttgtcttaaaaaaaaaatgaataaataaaaataaaatggacaccggcttgcaagtcctgagtcatggatttttttttttttttttttttttttgagatagagtctcactctgtttctcaggctggaatgaagtggagctcactgcaacctctgccccccaggttcatgcgagtctcgtgacgcagcctcccgagtagctgggattacaggcgtgtgccacacacggctaatttttgtatttttagtagagatggggtttcaccatgttggccaggctggtcttggactcccgacctaaggtgatctgcccgcctcgacctcccaaagtgctgggattacaggcatgagccaccacgcccagcctgtgagtcatgggtcttaaagggcttggtgcagtgggaccctgggagtcggtgggatgaggcctgggatcactggcctcggcgggaagaggcctgaggccccccctgggcccccggactgagtgcagccggggctgagacaagacagatggagcggctggcgtgcacctgcagagcagatccatcaattattgacactctgtgaggtgcatgaagaattcatgggacaggggtggggacggcagggacttgtgacataattgcagccagctcaccagagccacctcctgtgttttcaggaattttgccatctggtagttaaacgcagccattatttaacgtgggagaatataaacttatagttaaggctgggcgtggtggctcccacctgtaatcccagcagtttgggaggccgaggcgagtagatcacttgaggccgggagttagagaccagcctggccgacatggccaaaccccgtctctactaaaaatacacaaatttgtatttttgtacaaatacaaatacaccagctgggtgtggtggcatgcacctgtagtcctagctacttgggaggctgaggctgaggcaggagaatcgcttgaatccgggaggcagaggttgcagtgagctgagatttggccactgcactccagcctgggagacagagcaagactccatctcaaaatacatacaaacatacatacatacataaacttatagttaaataaagtacatttaagccaggggtggtagctcacacctgtagtcccagcactttgggaggctgaggcaggaggatccgtctcaaaaaaaaaaaaaaaaaggaatatagggagcaggggaagagtcaagggagccagggagttggtgcctggtcacccattttgcagatgggaaagctgcccccatgcatggggcctgccaagggtcacagcagggagacctcagagctgtggacggacctggacagaggctgtggacagggctgaggcctcctggctgttcctgtaacaagcgtgacacagccctgccccagggcctttgcacaggctgtgccctttgcctggagcatcttcccgcagaccctgtcattgcaggcccagttcaactggcccagcctctccctagagaggccctcctggttaccctgaacttcatcccccacccccgtggcccatatctctcttcctgaaattaacttgtttgtttctatttattggttaccggcacctcctccttccagcaggggaacagtttttgcacccaggctggagtgcagtggaacaatctcgactccctgcaacctccgcctcccaggttcaagcggttctcctgcctcagtctcccgagtagctggaattacaggtgctcgccaccacgcccggccgactttttttttttttttcagttgagtccgggtctcactatgttggccaggctagtcttgaactcctggcctcaattgatcctcctccctctgcctcccaaactgctgggattacagttatgagccaccgcacctggccaatcattgttttaaagtgtacaatttataaccagaaagttatgtgaccatcataaatttctggaatctctaattccagaacattccattaccactcaccccaaaaaaacctggttcccaatttagcaatcgctttccattttcccctcttccagtttccagcacccgcgagtccgctttctgcccttgtggacaggcctctcctgaacatttttttttttttgagatggagtctcgctctgtcacccaggctggagtacagtgacgtgatcttggctcactgcaagctccgcctcccgggttcacgccattctcctgcctc[134 bp omitted]ggcctcccaaagtgctgggattgcaggcgtgagccggtgcccggcccttcctgaacatttcatagaagtgggatcacacactttgtggccttgtgtgtctggcttctgtcactgggaatgatgtcctcaaggtgcatccacgctggagcttgtgtgtgagcctcgttccttttatggctagagaacattccattgtttggaccgatctcattttgtttattcattcacccattaatggacatacggacatttgagttgcttccacttgcaggctaccctgggtcacgccgctgtaaactgtgacgtgcaaaacaagtgtttgcgtggtgtatgcttgtgtttctcttgggtagatcccccaaagtggaattgctgggtcctatggtaactgtgtgtttagatgtctgaggagccgtcggactgggtttttttgttttgttttttgttttttgtgacggagtctcgctctatcacccaggctggagacctcggctcactgtcactgcaacctccacctcccgggttcaaatgatcctcctgcctcagcctccagagtagctgggattacaggtgcctgccaccatgcccagctaattttttttgtatttttagtagagataaggtttcaccatgttggccaggctgatctcaactcttcacctcaggtgatctgcccacctcagcttcccaaagtgctgggattacaggtgtgagtcagtgcacctggcttttttttttttttttttttttttccttttgagacagggttttgctctgttgctcaggctggagtgcagtggtgtgatcatagctcactgcagccttgacctcgtgggctcaagcgattctccccctctcagcctcccgagtacctgggaccacagacccgtgccaccatgcctggctaattaaaaaaaatttttttttgtagagatgggatctcgctatgttgcccaggctggtcttgaacttcccagttcaagcaatcctcctgccttggcctcttaaagtgttgggattacaggtgtgagccaccttgcctggcccagatgattttgtaatgaggaggcagcttggggtctagaaagccagggccttagcaaggcagggatgggatctgttttgatgcctgctgtatccccagtgcctctgtggtctcttctgcaaagcaggcaacctggccagtaccaggtgggaatgacgaataggcacaggtcgctggctcaggacactggggtttggttacaagcttctgccccaggacagctggtgctccataaatgctcgttgagccactgaatgggtgttaacacctgaatcccagaagctgtagcaggctgtgtgtgtttgtgacgatggcagggtgccctggcatttggagggcgatgcccctaggccccaggcagtccctaggaaggcccctgccctgtaagggctgatgcggccgctacaccgcctcctgcaggaaggaagacccaggtttattttggtcctcggcctgttcccctgggagagcagtcatcctcctgtctggctgcctggatgggagcgtttctggcagaacaatgggtcagggaggaggaaggggaaggccaggcagctgggccgccccaggtgtcagcaggtcccggggctgccccggccgtcttaggagtgtgggggccaggaagggaggccacagctgcttgccccccatccctcttcctgttggccttgcagggggcgggggttgctcttgggagcccaggcccttcctgaatctgtaaacaggcctgactcccgtccggaatcaacttcttcagcctcaggactcacagatgggaaagtcaaggcccagcgaggggcacagccctgcctggggtcacggagctcccgagatgggcagaaagatgtgggctccagggccgatggggtccaggggcctcatccccagatgcagagaaaggccttttcctcttcgagtcccctcggtttattcatctatgaactggggaggctggacccaggggttcgggagtttcctcttagaatctgcaaacatccttttttttttttttttttttttgagattgagttttgctcttgttgcccaggctggagtccagtggtgtgatctcagctgactgcaacctacgcctcctgggttcgagcgattctcctgtctc[134 bp omitted]tggcttccgaaagtgctgggattacaggtgtgagccaccgcgcccggccagcttttttttttttgcacagggaatctcactgagatagaactaggtctgcaagttcacagagctgaggtgggcacggaagggcggaattccaggcagtggttgcagcctctcgtccagaggaagctcacagcttagggggcattgcggtttggtcacaagcttctgccccaggacaaagttcgttccgatcttccccatatttcagatggggaaactgaggcacattgttaagttgcttgctgcagaggccagagctgggagcaggccctaaatatcagggttgccctctaagactcacggccagttgagggcgttaggtggggaaggcacagggagttggggttcaagggcgttgagagccagtggttactgtattgctgtgtggtcttggggaagtggctcagcctctctgagcctttgtggtctcttctgcaaaacaggcaacctgcctagtacatggtggcgatgacaaagtgggcacacatcgctgactcagggtctgccacgtggcactgagtcaacagcacccctcttctggcctaggcctgtgcagagccagggtctggtgaccgaggtcggagggcaggggcggcccatccagcaattcccgtgcctgccctgacctcagagggcggccgagggtttggaacttctcccggagtctgaactcacacaaagaccggctttgtgggggctcctggggtaggtgggtgcccacatggcattccaaggctggcagcctggcgctggggtgggagtggaggctgagcagggtctggggcagtgagagagaccgggggcgggtctcaggccctccctcctccgccagttcttccacactcccctcttcattcagcagatgtttctggagtctgcagggacaccgtggataaggaattgggcccatgacctcccctgtggcctggggtgaggcagaccagttggggtgcagagctggggagcagaggagcaatggggatgcctggggaacctgcggctcagaggaggcagagacttgggggccaaagtgatggggatgtatagtttaccagggaagaggcaggggcttgggggccaggctttggggggtgtataggagttcaccagggaggagatggggccttagggtattgaggtccacagggaagagtcagggctccaagtgaggtgtggagcttggtcctgggagctttgaggagctgtcagcttgttctcagcaggtaagggctatgccctactctgagatttaggaagaattccggagctgcaggaaggaggtgggtggagggggaagctccagggctggggaaactgggcaggctacagggcagggtggacagagaaaaggagcagacagggacagggggatggttctgcagtgagaggcctggcccttatgcctcgagagctggccaggctctcaccttggccacctccccagtcccagcctggacgggggctgtccaagtcaatgtttccctgttggaggaatcatcggagccatgccttcccagaaaccccacaaatggccccctgtgaacccatcaccccctggctcactcggggctgaaggccttggacatgcctgttataaaccctgtcgggggccaggtgtggtggcgggcgcctgtagtcccagctactccggaggctgaggcaggagaatggcgtgagcccaggaggcggagcttgcagtgagccgagatcgtgccaccacactccagcctgggcgacagagggagattccatctcaaaaaatagtaataataataataataaaataaataaataataaataaaccaaccctgcgggggcagtgggactggaggcactgccatagtaatggggctcctccaccctgaacagccccgggtctggggctcacttggaaccccacctcatggagctgtggggtgagggtggggagtgttgagctggacctaggggatggaacggaaccccctgtaacaatcaccttgagccccttctcagctcatagcaaggatatgatgggtttgagggctggcatcagaccctacagatagtggggttcagaagggccttctctgtttgtttataataataatcataataataaatacaaaataaaatttttgattttttttttttagagatagggtcttgttatgttgcccaggctggtctcaaactcctggcctcgcaattctcctgcctcagcctcccagagcactgggaccacaggcatgaaccacaggcttgaattataggctgcagtgcggtggcatggtcttagctcactgcaacctccgcctcccgggctcaagggattctcctgcctcagcctcccaagtagcggggattgcgggcacccatcaccaagcctggctaatttttgtatttttagtagagagaaacatgggtttcaccatgtttgccaggctggtctcgcactcctaacctcgatctcaggcgatccgcctgcctaggcatcccaaattgctgggattacaggcgtgagccactgcgtccggcatgacactttttaaagaaacaaattccgttaggccctctggggtctgtggtgttgtcacctcttctgtgtgaggagtgccccaacgtgcaaaactgagggctggtctgtgtcccccgcaggccatggacaccttcagcaccaagagcctggctctgcaggcgcagaagaagctcctgagtaagatggcgtccaaggcagtggtggccgtgctggtggatgacaccagcagtgaggtgctggatgagctgtaccgcgccaccagggagttcacgcgcagccgcaaggaggcccagaagatgctcaagaacctggtcaaggtggccctgaagctgggactgctgctgcgtggggaccagctgggcggtgaggagctggcgctgctgcggcgcttccgccaccgggcgcgctgcctggccatgacggccgtcagcttccaccaggtggacttcaccttcgaccggcgcgtgctggccgccgggctgctcgagtgccgcgacctgctgcaccaggccgtgggtccccacctgaccgccaagtcccacggccgcatcaaccacgtgttcggccacctagccgactgcgacttcctggctgcgctctacggccccgccgagccctaccgctcccacctgcgcaggatctgcgagggcctgggccggatgctggacgagggcagcctctgaaccccggcgccgcccaaccgcgcccctcgcgccttttggggctctcctgctgggcgcgggtggggtttgtgggtttttttccacctcttttctcccaatcggactccggccaaactcccctagacagatgggtgacctgtctcctttgagaggatgctgaggcatctgtagcagctgtttcaaacaccaatgtcacctctcctcctggcccccgcccaatggggagaggaatttggggccctactctggggaccacctttcacccgtttgtactttctgggccacgccgacccctgggtcgcttgatgtaaaagccaaaagctgctgcctcccacttggatcatgtcgcctgggattttcatccctcgcacaaggactacgggttcacacggtgaactgggggaagggaagtgttagggggcaagtcgcggcacccccccttccataaactcacgtcctaacccccaggacctcagaagatgatctgatttggaaataggatcattacagatggaattagttcagatgatctcatcttggagtagggtggg[187 bp omitted]gtggcacatgcctgtagtcccagctactcgggaggctgaggcaggataatcacttgaaccaggaggaggaggttgcagtgagccgagattgtgccactgcactccagcctgggtgacagagcaagactctgtctcaaaaaaagaagcgggggagtgggggattgaggccacgtgcagtggctcactactctaattccagcactttgggaggccgaggcaggaagattgcttgaactcagaagttcaagaccagtctgggcaacatggtgagaccctcgtctctacaaaaaaaaaattatcgtggtgggccgggcgtggtggctcacacctgtaatcccagcactttgggaggc[134 bp omitted]gaggcaggagaatcgcttgaacctgggaggcgcaggttgcagggaggcggaggttgcagtgagccgagattgcaccactgcacttcagcctggtgacagagcgagactcgtctcaaaaaaaaaaaaaaaaaaaaaaaaaaaagtgactgtggtggtgcacacgtataatcccagctacttgagagatgacgagggaagatcacttgagcccaggagttaagaggctgcagtgaccgatgatcatgccactgcactccagcttgggtgagagtgggactctgtcttagaaagaaaaaaaaaagtatttggacacagacatgcatgcaaggaaggccaatgatgccggccaccaccaggagctgggagaggcccagggcagatccccttcagccttggagggacctagccctggccacaccttcatctcagacttgcggcccagagaactgaatgagaataaatgtgcgtgaagcccctcagtccacaggatgtggtactggaagcccccactcaagaaggctccagtgaatgctggcacgttcagccaggatgcctccgtgaagctggagacctctgccctgggtcgggaggggaaactgctccaatccagggactgccacatgggaggggacggagcgtgcccacctcccaggggtgaggggggacccacctgagatgtgtgcacattttatttatttattgttttgagacaaagtctcgctgtgtcacccaggctggagtgcagtggtgaaatctcggctcattgcagccccttccttccaggctcaagtgatcctcccacctcagccccgggtagctgggactacaggtgtgcacgagcacacccggctaatctttgtattttttgtagacagaaggtctcaccatgttgcccaggatggtctcgaactcctgggctcaagcgacctacctacctcggcctcacaaagtgtgcacattgtaatatcgtgatttcatatttggagaatcagcaaccaaccagccaaccatgttgcttttataagacagagctgagaaagcaaagcttggctgtcgtcttggctctggtaccacccacgagatgcgggcgattctcagctcagggcgtggaggcgtggtgtgggggagtctatttgccatttttgtttgtcagcagggggcaggggttctcaaagattgcaaaatgctgctgcaggtcaggaaggttattttgggtgcctgtgggggaggtgaaacaaggtcccatgactgttttgcagaaccttgtctgtggagggtagaggttgcggcaggggcctgtgggccttacttggtgagaaggtaggtctagctggctccattcagtatttgagacatttggaatttgtctgcatttaaaaccaagagatcacacacacctgtctggatttggagtttctcttgaaaactcgccagtccggccgtctgagcctgcactgacgcctggtgaagctgtgcaggggccgcccctctccctttcaccacagtcctctccactccctttcgcctctccctggcctgctgcactcactgataggaaattctgaccccagactcggagcagccttcccgtggttcggtttttgcttccgcgaaaaagccaaaggccttggccagagagccagctgttcctacctctaccccacgcttccaaggcaaccttctccacttatcttaggccgagagacagctcttcaagaacgtacatggatcctgattttctcacgaagtcccgatggaaccctgtgctgttgagacatcagtgtgtaaaactctctgtgtccctgttgggctgtccagacagtctggactcttgtaaatttgagatttaattaaaggaaacaaaccaaataggactgcggaacaatttaaataaaagcacacaccagcctgggcgcagtggctcatgtcagttaaacctagtgctttgggaggccgaggcaggaggatcacttgagccaaggagttcaagaccaccctgggcaacatagcgagaccctatctctaaaaatatatatatataaggccaagtgcagtggctcacgcctgtcatcccagcactttgggaggctgaggcaggcagatcacctgaggtcaggagttcaagaccagcctggccaagatggtgagaccccatctgtactaaaaagtacaaaaattagctgggcatggcggcgggtgcctgtaatcccagctacttgggaggctgaggcaggagaatcacttgaacctgggaggcggaggttgcagtgagatgagatcgtgccactgcattccagcctgggcaacagagtgagacttggtctcagaaacagaataaaaaaataaaaaattatagccagtcagggtggcatgcacatgtggtcccagctatctggaaggatggcttggacccaggaggttgaggctgcggtgagccgagatcgcaccactgcactccagcctgggtgatggagcaagatcctgtccaaaaaaaaaaaaaaaaagcacacatatgcacacgtaaggtcagaggggaagctcctgtgtgtcccgagatgccctgatgtatgctggtgcatcaggccacccgggcatcatccttgatgacagccagggatccagaagctgtgggcgaatcccagctgaccaggagagagtccccctaccttggccagggtactggtggtaggcactgtttcccacggccttttctgcacaggaggccctggcaaccctgtcgtgctcatcttctgggccccgtggagcctcagagtcaagagctggaaagcctcctggccttggcgggggggtcttcagacctcagagcactgccattcttggtctaggggcccttcccgctgatgtgtgcggccgtcagtcctttcctcatgtggtggcatcaagtgtgtgctgggaagtcaaggctggctggttctttttcttttgagacaaggtgtcactctgtggcccaggctggactgcagtggcgcgatcttggctcactgctgccttggactcctgggttcaggcgattctcctgcctcaggctcctgagtggctgggattacaggtgtgccccaccacacctggctaattttaaaattatttattttttggtagagatgggggtcttgctatgttgcctaagctggtcttgaactcctggtgtcaagagattctcccaccttggcctcccgaagtgcggggattcacgggcgtaaaccatcctgtctggtctgtttttgttttttagtcact[131 bp omitted]aaacgctgtctctatcaaaagaagatgcaaaaattagccgggcatggtggcgtgtgcctgtagtcccagctacttggaaggctgaggtggcaagatcgcttgagcccaggaggtggaggttgcagtgagccgtgttacaccactacacttcagcctgggtgacaggagaagaccctgtctcaaaagaaaaacaaactaagggaaaccaatgccccaggctgcagagagcaggtcggccttggaacatcctcccgcgctggggcctgtggcagccacagaaacccgggtgtgaattcacaacatgtgggggacccagggacagcgagtgccaaggggggaagggggcaagttcacatacagccaccttgggatctagcgctttgatgcctgcagagaagtcccacccagagacaccgcccacccgcccacggtggggcagtgtcagccgcgtctgagctcctgacccgcaacggccagccgggagggcccaggctgtggggttgctttttaatgttcttatttatttaaatatgaaaaaacatttcatctcttcccagttcatctgaaaggaggtcccctgggtaaacataggaaagcagttctgcaggctcatgaaggatgctcggctggaggtcggggggagcatggctgctttccccagcatagcccccatgttccccaccctctttgtgccccggatctgcgatcctgagtccagaagagctcagcaggaagtgggaactgagaagctgttgggagccaggagggccctggaccctctgttctctgccccagggcttcagccaccctgcaagcccctccggacaaggcaacgtcagcccaggtagaaaacttaagagtccctcctagaaaaccagtgatgtgctggccctttcagggacacaggccccttcagcttcaccggagatgagaaggtgccacccgcaacagggctgctggtcacagctcagtgcgcgatgccttggccacaatcaccagcttggacagctcagctttgaatgccccgggcctgtgagccactgcaagaaagaaacacatggttgggccctcaacattgaaaattctcagaagtccggaggatttggggtggggcccatggtgggggctaagcaggcaaggggagcagtctccaaagcagactcccatgtgaaaaggccccaggcactgaaagtcttacgggtgacagacaggaaaacagtgatgtggagggtaaggtcggtggggctaacatagatggcaggcagcaggaagccacagaaagacctgaggtgggaagaaccctggtcatttgtgccatgttgtcaagaagagatgcagaaaggggccagaagaagcccaggaaggagatgatcccggcctgaacaggatgcagggtgggtcaggctgcaagacctcctgctcagtgggtgaacctgtctgaggccctcatgacacttctccagcagggtcagaactctggcttccactgcttcacccaagtctcccggccctacctgctgtgtccactcccttggctcccacccttgccccagctcggcgcctccgattcctctttctgcttagcattggcgccatgcagctgaatgtggcttgaggacaccggtgctgctcaggcaaccgaagaaggaccctgatgtttcccagtgacccctgcagcctcccctcggcatgccacagtcccaacctcaaagccctgatggtttctactttgttttatttcatttatttattttttaaaatttattattttttttgagatgagagtcttcctctgttgcctaggctggagtgcagtggtgcagtctcgactcactgcaacctcctgctcctaagttcaagagattctcctgtctctgcctcctgagtagctgggattacaagcatgtgccaccatccttggctaattttggtatttttagtagagaaggggtttcaccatgttggctaggctggtctggaactcctggcctcccaaagtgctgggattacaggtgtgagccaccatgcccagccctgtttattgtttttgagacagagtcttactctgatgcccaggctggagtgcagtggtgcgatcatagctcaatgcagcctcgacctcctgggctcaaataatcctcccacctcagcctcctaagtagctgagactacaggtacacaccaccatgcccggctaattttttttctttttgagacagaatcttgctgtcttccaggctagagtgcagtggcatgatctcagctcactgcaacctccacctcccaggttccagcaattctcctgaatagctgggattacaggtgcgcaccaccacgcctggctaattttttgcatttttagtagagatggggtttcattatg[141 bp omitted]ccaggctggtcttgacctcctgggctccaatgatcctcccaccttagcctcctgagcagctgcggtaacaggcatgagccaccgcgcccagctaagataaagttctagtggcacacagccacacccacgcatggacatactgtctgcagcagctttgtgccacaatggcacagctctagacagaacccacagtgccacaaagctgaagatattgacgaggtggcctttatagaatcagtttgtggatgcctggtctacagtctccaggacccctatggctgacccccctctccaaactgccccgattgcccacccttggatgggggtggcgtcacctctaccccatccccatctttccgtacctgctgttttggtcacttcaaattcctcagttttcagagggacatcactttccctttcaaatgcggctttagactgaaaaagaatgagtggaaactttaccagggccagttcaatgctcatcattaggaaaacgattgagtttgctttccagagaagcacagactaaagctttctacttttactagagatggagaggagacttttttgtttttgagccaggacctcactctactgtccaggctggaatgcagcagtgcaatcatagctcactgcagcttcaaagtcctggactcaagtgatcctcctgctgcggcctcctgagtaggtgggactatgggtgcatgccaacacgcctggctattttttttttacttttggtagatatagggtcttgctatgttgcctaggctggaatcaaattcctggcctccagcaatcctcctgcctcagcctcccaaattgctgggattactggcgtgaaccgccgcgcctggcctggagaagtcttttctggcatatacaagagaagccagcagcaacaggttaccaaacccccgtgcccctggcctgggggcgtctgtgtgccaggttcctgcaagttacacaccctacctctgcaggattcgctgtcccctctcctccctgtccccatggagccctcttgtggcaggacatctcacagctgccccagtgcacagaagccacacccggagcctgccccactccaagatactcacgtaggccatggcgtactcaatctcagcgccccgcacctctgccttgaactgtgtgaagtacagataggacttcccctggggcctgcagaggaagagggggcgagggagtcaggccaggcctgctgggtctgggtctgtgtgccctggaaggagccccgccagggactcgggctggggtcagcaggtctcgtgcctgcttctcaacatggacgccattcccgagcacgagcacctgctgactgggaaggatggatggggccctctcaacagcagaccctctttcttttgtgccagaatttttttttttttttttttttggagacgagtctcactctgttgcccaggctggatggcaatggcacaatctcactcactgcagcctctgcctcctgggtttaagtgattctcctgccttagcctcccttgtagctgggagtacaggcacccgcgaccacatctgactaattttggtatttttagtaaaaacatggtttcaccatgttggccagcctggcctgaacccctgacctcaagtgatccactcgcctcagcctcccagagggctgtgattagaggtgtgagccactgtgcctggcccctttgtgccagaatgttcttccagctcattcatagacacgcctctctcccctgtgggctgggagctgctctgggacaggaccccatgtccattcactgcacatggcttcttggttgctgacagcaatccaggtactacgacgggggctggggctgggcaatgagaggccagtaaaggcttctcagagggcattgactaggaagtacaggagttaacttaagaagtggggaggatcatctgcccaggtctctagaaggctgctaacggaggcttctaaggaactggagtggcagaaggtgtcggaaggtgacagcaggggatgatggcatctctggtgtgaagagagtgtgatggggatggaggggcagcaggggggccatttctgtggaagccctggctggggttctatgtgcatgggtggggcgggggtatccagggagccctagattcttctttaagccctagcactgccaacagccctggtcagggagggtccagtcactgtctgagatgaggaggcctggggtggcaggtctccggggctgagcatgcccctggggagcttttgtgggggttggacaggaggattcaggctcaaggtgagcccagccaccatcccaactgctccagacctgcacctgcccagatgccctctggggagctggcactcaggggtccatgcagggcagtggcctgcagacagacgatggcgaccgtgggcttccccaagactacagggcggcctctgcagggtctctctgggctgatggggcctatctcctctcaatgaccctcctgatgcctcctggggccttggcctgcctgtgatgcagccagttccatggagtgggtgagaatctccccagaaacacctgctgtttgtaaagcgccccgcagggcacggcgggacaacacccacacgaggcagcaaatcacaccctgtccttcagttaaacgtcgccactccctgatctctgcctcccatttgtcaacgtgctttaacctgaccgcagtggtggagctatagcttggacttctccctccaaagtgtctgcacaaaataaaggctcaagaaatacccactgtttgggctgagacattctgggccaaggatcagggaagaagggacaagattcctgaagcccccgaccccctccccaccggggggcctgacggcttccttcccttcatgaccttgcccagatcgagctgggatctaggcagtggggttacgagaatgagtggggcgagtggagccgggataagcccataaaccatgagcctgacagaggatggcggcaggggcagaatcgggcggtgtctggggagacttggggaggggctgtggacccagatgcatgtgtgttcgggcaggtggaagagagtgcacagcttttgtctgattcccagatgtctgcaccccaagaaggctatgagccatcaggctggtccttcagagaacatgctggtaaagacctgcctgaggggaaacagctggggccccttctggtgggacacattccccgggagatagcatcatccaaacctccacagccactaccccacagactcccacacctgccacctgcctagctcgtccccagcccagacctgcaccagctccgccagttccaccaggactctgcccagcaccttcctcctcctcctaccccagctagctgattccacagcctccaatctgtgccctcccctcctccctgtcctcattttacacagcctccagtctgtgccttcccctcccactccgtcctcattctacagcctccaatctactctccccaccccactccatcctcattctacagcctccgatctacattccccacccacctcatcctcattctacagcctccaatctaccctccccacccgtcctgtcctcattctacacagcctccaatctaccctccccacccgtcctgtcctcattctacacagcctccaatctaccctccccacccaccccatcctcattctacagcctccaatctgtgccctctccacccatcccatcctcattctacacagcctccaatctacgctcccatccaccccatcctcattctacagcatccaatctactctccccacctaccccatcctcattctacacagcctccaatctgtgccctctccacccaccccatcctcattctacacagcctccaatctaccctccccaccccatcctcattctacagcctccaacctgtgcactctccacccaccccatcctcattctacacagcctccaatctatcctccccacccaccccaccctcattctacacagcctccaatctaccctccccacccaccccatcctcattctacagcctccaatctaccctccccacctcatcctcattctacagcctccagtataccctccccacccaccctgtcctcattctacacagtctccaatctgtgctctccccacccaccccatcctcattctacaaagcctccaatctaccctccccacccaccccatcctcattctacacagcctccaatctgtgccctctccacccaccccatcctcattctgcacaggcttcaatctgcgccccacccccaacccccgactccatcctggttggtgcctggaggggctccctgcctcagcctgcctccttcagccggggggatctgagctccacatgttcctgcagggagccctctggaataggactcagccaggaaaagaaatgaggctgacacgggcctcagcatggatgagccttgaggacgtcacgttcagtgagagacgccagacaccaaaggccacacagggaaggtttgaccccatttctatgcaatgtccaggacacgcccatccacagagacaggagggggatgcgtggctgccatgtgctgggaaggagaatgactctgatgggaacagagtttattttcaggggatgaaaatgttctggaagcagaggtctggctgcacacctctgagaaagtactccatgcagctgaattgtgagcttaaaatgctgtgctttatggaattttatctcagtttttaaacattgccaaaaagggtcaggcatggtggcacacgcctgtaatcccagctactcaggaggctgagggaggagaatcgcttgaacccaggaggcggaggctgcagtgagccaagattgctccactgcactacagcccgggcaaaagatggagactccatctcaaaaaaaaaaaaaaaaaaattgccaaaaagccctttggtgagttcgtctcacccttaggggagggtggagccccttggggccttcctgggccctggtccacgctccgcaccctctgagctgcttctccttttcctgggaccttgccccgcacaggctccccccgtctcccccagaccttctcagtctctgcatcagtgcacttccttggggagcactcccaccccagcgaccctgccaccccccacctgcacgtgcatgagtctccctgctggtctgtcttcccctccaggggtgcagccctcgttccctgccttccaaagcagctcctgaggccacagggcaggccaacggcagccggaaatgccatccccaccccgagtctcacctccagatggtgcaggtgaagtgctggtggtcttcgctggtccccagactcatctgccattgctggggagagaagacagcgcgggtcagccccggacacacagctgctctcggagacttctaggtgtgcctctgattctacagtcaggccacctcttctgtacctcccgattcaggggctggccactaaatcccctgccccgccctcctggtggcctggggtttgctgtcatctgtgatcagggagcctgcctgcaccacatccttcccataaaagtggtgcctctaatgagaactaccccaaagtggctcccacggatggggaaataggaacaacgctgtttgtttgtttgtttgtttgtttttgagatggagtctctctctgtggcctgggctggcgtgcagtggcacgatctcgcctcactgcaacctctacctcctgggctcaagcgatcctcccacctcagcctcccaagtagctgggaccacacccagctaatttttgtgttttgtagaatcactgtcttgccatattgcccaggctggtctcaacctcctggcctcaagcaatcctcccaccttggcctcccaaagtgctgagattacagatataagccaccatg[145 bp omitted]aaccccatctctactaaaaatacaaaaaattagccgagcgcagtggtgggcgcctgtagtcccagctactcgggaggc[175 bp omitted]ctatcgtgagatacctttttctcccaggtcagaagggcaaaagccctcctgtctgctaacacaccatatgggtgtgaaaaccaagactattccaggttgtcggtggagctgcaacaggtacaagcaaaatggaaaatgcaggctgggcatggtggctcatgcctgtaatcccagcactttgggaggccaacgtgggatgatcacttgaacccaagagttcgagaccagcctgggcaacatagcgagaccccatctctaaaatgactggcctcttgcacgatgttaccaccggggaacctggttaaacggtacttggatctctctgtaggatttcttacaagtgaatgtaaatctaccatgatctcaaaacatacagttttacttttttttttttttttgagatggagtctcgctctgtcacccaggctggagtgcagtggtgcgatctcagctcactgcaacctctgcctcgtgggttcaagcgattctcctgcctcagcctcctgagtagctgggattacaggcgcgtgccaccacgccctgctaacttttgtattttcagtagagatggggtttcaccatcttagca[133 bp omitted]gggtggttttcccacagatgtaactgcacttgtacaatgaaccctggccaaggttattcacggactgggttggaagtaaccctcaatccattagtacgggattgtcaactccacacgtccatgcaactgaagcgctt[132 bp omitted]gaaacccatctcaaggtgttgaccgggctaggctcttactggtagctcaaggtcctcttccaagctcttgtggttgtggcagatttcagttcctcttggttgcgggactgaagtcttcatttccttgctgccagccagaggctgttctcagctcctagaggccgcgtgtattccctgccctgcag[153 bp omitted]ttcacgccattctcctgcctc[212 bp omitted]gacggggtttcaccatgttggccaggctggtctggagctcctgacttcaggtgattcgccagccttggcctcccaaagtgctgggattataggcatgagccactgtgcctggcccaaatcatctttactggctcttctgccaccagctggagacaacagccagcaaggaaaccgggaccttggtccctgaaccacaagtaactgaattctgccaactaagagcttgaaggagaggattcttctcccagcccagagactttttttttttttgagacagggtcttgctctgttgcccagtagcacaatcacggctcactacagccttgacctcctgggctcaagcgatcctcccacctcagtctcccaagtagctggaaccacaggtgcacgccaccacgctgggctaatttttttattttctgtagagatggggcatgagccaccatgccttgcctgtgatacctttatttatttattatttattttttgagacagagtctcgctctgttgcccaggctggagtgcagtggcacaatcttggctcactgcaacctccgtctcctgggttcaagtgattctcctgcctcagcctcctgagtagctgggactacaggcatgtgccaccatgcccagctaatttttgtatttttagtagagatgaggttttgccatgttggccaggctggtctcgaactttgacctcaggtgatctgcccgcctcagcctcccaaaataccttgagtttggttttatgaagcacacaactgagctgacccagacttctgacctacaaagctatgagataataaatgggtgctgttttaagcccctaagctgtgataacttgttgcactgcacataaaatacaacatcccaacagatgctcatggggatggcagactcccatctcccctccctccttctgtccagacatttgcttgctctgtagaataataacagcagaatctgtcgtcactgtttaatgccaatactctccctttttattggtttaggaagagtcattcaatgagtgtaaggtgatataggtgagacccaaccctgctgtctgctacagaacatctccctacaacaatggatactgtcacagtaagctagagggaattttgaacaactcacctcattggtccctccttgagaggcgtaagtgaacatacacgtatatttgtcctagagaatggaaggaaaaaaaaggtttggtagaaggaaatttttattttgtttaagagacggggtcttgctgtcacccaagctggagtgcaggggcacaatgacagctcactgcagcctcgaactcccaggtttgagtaatcctcttgcctcagcctctcaagtaactgagacaataggtacgcaaccaccacacccgactaatttttttttttttttttgaagcagagtcttgttctgtcgcccaggctgaagtgggatgatctcagctcactgcaacttctgcctcccgggttcaaacgattctcctgcctcagcctcctgagtacttgggattacaggcacctgctaccacacctggctaatttttcgtatttttgtagagatgggttttgccatgggacctggacaagtgaaaacttttctgagcctctagtttctctctgtttctcttttttatgtgaagcattttctcatctgtaacttgggcctaacatataaaggacttggcatcacacctaactataaggaagtagtcaacaaactggcctggcacagtggctcacgcctgtaatcccatcactttgggaggccgaggtgggcgggtcacctgcggtcaggagttcaagaccagcctggctaacatggtgaaatcccatctgtactaaaaatacaaagattagtagtcccagctacttgggaggc[136 bp omitted]acacgtctgtaatcccaggtactggggaggctgaggcagaagaattgcttgaacccagaaggctaaggatgcagtgagccgagatcccgccactgcacgcaagtctaaaaagaaatagtcaaaaaacagtaaagatactgttattacaggcggggaaagggaggctgagaggggaaaggactttgccgacaagctgagtacagggctgagggcccggcctcacaccctcggtgaggggggaccttgtgcaatggaaggaaggagcacttcctccctcttcggagctgcagcgactgatttccttcaggcccaggagggcagatgccctttagcctcctgccgctcccatcactgacccctccccacctctgcgtctggagggcaggggtgcctggacactccaggcaggcgacaggtgacaggtgatcacgccccctcaacgccgccggggcccacaaggccccgctccctatgagttcagtcctgccccagtgatgaccccggcctcacggtcccgcgccccccactcagcctccgaccctaacaatccgcaccccttcttcagtacccacctccgcggtccgcgccccctcctcgggccccgcccccaatgctccgcgccccctccccgggcctgccagcactcaaatatccgggacggcggtggcacgtacccccgggcccacgttatgggagaaggaatgcacgacgccgccgggccgcacgtcaaacgccaccgtcgtgggctcggacaccgcctccgccggcctcagcgccacggcccctaggagcagcgcggcccacaagctcgcgccgacgccgttccaccctccgctgggcgccgccatgttggactagggtcctcagggcaggggcgggtagacggggcgcggcgagggacacgtggagcgtccgccggaggccacgtcggcgtcggctgtccacgtgacccggcacgccccgccctgtccaccgcccggggccaccatcttgggggcgggactttgtcgagggggcgggacttttgccgagggggcggggccgccgagggggcggggccgccgagggggcggcctcgtaccctagggaccctgcgtagcccggcgatccttggagggtccctcaggtggtaatggagttcgttttggggtctcagggtccctcaccagccgtgtgactgactgcagctctttcagttaggagatgtacagggagtgagggaaatcgaaggtcaccattaggcgaacttctcataatcgttgcagccaagatgtgtgtgcatcgatattcaaaattagcagagggaaagtaggatgagaagcaggatgcttgcttttgtttccctcttgttgcccaggctggagggcagtggcgcgatctcggctcactgcactctccgcctcccaggttcaagtgatgcacctgcctcagcctcccgagtagctgggactacaggtgttcaccaccacccctggctaatttttgtatttttagtagagacaggttttcaccatgttggccaggctggtcttgagctcctgaccccaagtgatccgcctgcctcggccttccaaagtgctgggattacaggtgtgagtcatcacgctcgatcagtctgtgtatttgttaataggattatgtgggtgttcacttcctggctttgataacctggcttgtcctaggggttacagacgatgttcacattagggggagttggatgaagcgtattaggaaaccctacagtttctgcagattttctgggaggcaaaaattatttcaaaataaaaagttaaaaagaaaataatccctacctcaaggagttgttgggaggagtaagtgagggaattaagttcccacaccgggacgaatgaactgagaattatatattgtagctattgctatcattagatcccaggttttcaactagagaaggaagtcattctttggttacaaatggcttaacatttcaagaaaacaccagtggccaggcctggggggtcaataattaagctggtgtttctagtccttcccaactggcaaaaaacagaatccagagagaaaacgtcatagatgactcctaagatgggttataattcaccctttgaggaattaaatcactctactccatagctacggagggtggtgagccccagggaggtgagaaggatccccgtggaggctgactcctctgccaatgacagaagtccaagccagttgcctttctgcagtggcagcctgttctaaattgggatacctgcttgcgttaggaaatttattggccgggcgtgatacttcatgcctgtaattccaacccttcgggaggccaaggtgggtggattgcttgacctcaggagttctagaccattctgggcaacatagtgagaccccattcctatatatatattcatatattcacatatgtgaatatatatattcatatattcacatatgtgaatatatatattcatatattcacatatgtgaatatatatattcatatattcacatatgtgaatatatatattcatatattcacatatgtgaatatatattcatatattcacatatgtgaatatatattcatatattcatatatacttatatattcatatattcatatatacttatatattcatatatatgaatatatattcatatattcatatatatgaatatatattcatatattcatatatacttatatatatattcatatattcatatatacttatatatattcatatattcatatatatgaatatatattcatatatatgaatatatatattaatatattcatatatatatacttatattcatatattcatatatatacttatattcatatattcatatatatacttatattcatatattcatatatatacttatatatattcatatattcatatatatacttatatatattcatatattcacatatatacttatatatattcatatattcatatatatacttatatatatatatatttaaagatattttaagattattttttaaagatagccggacatggtggtgggcgcctgtaatcccagctacctgggaggctggggcaggagaatcttttgaacccaggaggcataggttacggtgagctgagatcatgccactgcactccagcctgggtcccagagcaagactccgtcttaataaataaagaaataaacaaacaaatctcttcctccatgcagctgtctgttctggacccatgagacactgtctccataaactggacaagcacagagcagccctgttccttaggtgagtgacacagcacggttccactgatggagtccccattaccttaccacggtgttcaactttcagcctgtcaccatgaaggattcgatgcatggccgagctctgcggctaacaaggaatttcagttgtgagctgttgggagtctgctacggaacccaggcaggttgtgcgtatgcgtgtgcatgcgtgtgtgtgttctttccagaaaggtttcggccccaagtttcacccacccaccacaaatcatcacactaaaaggattaaaagaaaaaacaaggctggccccagtactttgggaggcagatcactttgagctcaggagtttaaaaactgcctgggcaagatggcaagacaccgtccctataaaaaatacaaaaacattagctgggcatgatggcttgtgcctgtagtcccacttacttgggaggctgaggccagaggatgacttgagccatggaagcagaggttgcagtgagctgagattacaccactgcactccagcctgggtgacagagcgaaaccctgtgtccaaaaaaaaaaaaaaaaaaaggaaagaaagaaaaagaaaagaaaacaaggctggacacagtggctcttgtaatctcaacactttgggaggccaaggtgggaggatcacttgagcccaggaggtcgaggttgcagtaagctgtgattataccactgcattcctgcctgggtgacagaggagcaaacaacaaattattccacggatcccactaatcatgatatgaaatctgtcagtcctaaaggacaagattcgatcacacaaatattagattatttatttatttttttttttaaatttgagacaaggtcttgctctgtcgcccaggctgaaatgcagtggtagtttcagctccctacagccttaacctcctgggctcaaatgatcctcccactcagcctcccaagtagctgggattacaaggcatgcaacactcacccagctattattattattatttttttgtagtgatggggtttatgccatgttgctgtggctagtctcaaactcctgtgctcaaatgattcacccaccttggcctcccaaagtgctggcattataggtgtgagccactgtgcctggcctcctttttgtgtgtgtgtgtgtctgtgtgagacagggtctcactctgttgcccaggctggagaaacctcctcagctcactgcaacctcctcctcctccagggctcaagtgatcctcccactgcagcctcctgagtagctgggactacaggcgtgcaccattgcgctgggctaattcttcaatttttagtcgagatggggtttcaccatatcgcccaggctggtctcaaactcctgggttcaagtgatctgctggcctcagcctcccaaagtattgcgattacaggcgtgagccaccacacatggcctttttttttttgaggctgatctcaaatgcctgggctcaagccaacctctcgccttggcctcctgattagctgcgattacaggtggaggccactgtgcctgagtcccctaaatatcattttgtactggaatttttttcttttttatacttcctttttgatgttgttgttgttgttttggagactagggtcttactctgtcacccaggctggagtgcagtggcatgatcacagctcactgcagcctcgacctcccgagactaaagtgatcctccagcctcaacctcctgagtagctgggactgcaggcatgcgccactacacccagctaatttttgtttttgtagagccagggtttcacaccatgttgcccaggctggtctccaactcctggactgatgcaatccacccatcttggcatccaaaagtgctgggattacaggtgtgagccaccacgcccggcctcgtatgtttttttaagcccccccccccctttttttttttttaaaaaaagtggaaatttccaaaggatggagcaagtggataagcagggcagtccatccctgctgttagaaatggagcccacatgccccgcacgttgcaaacagggtctgctgggtgtcttggctgctgggacgatgtgaggagggccttggcctgtcgtggtcctcagggtgcagagtctcaggtagaaaaggaggtgttggctgggggaggatccagcatggaggatgctgtaatttgggttgtgctgaggctctggggagcccggggggccagtccaggccacacacgacagccagagctgagtccctggagaccggtagaccttcctagaccagcgaggacaggactaccctcatcaggtggctggggccatcctctgtgggtcagtctgatcagggcatggtgcccaggcagccccagcaccccaggagtccccacagatggcagtgcccttctgccatgtcttgtctgttgccccccggaagcccctcccactcaggagccccaggacttagaaggaacctcaggcaggtgacatgtttccaactggaatcgtttaatgtgtctacttcttccacgcataattataaaagaataagaatcgacaaaaatattttctttccataatatgtagaggtggtttgtttcttttttttttttttcttttctttttacttttttttttgcccgcccctggcagagctcttggcggggagggaaggggagagggaaatataaccctgaggtggggatggttcagctcccaaccccggaacccctggtgtgtacgggtcaggcagacacatgtggctgggcggctgggctggggaggggacagccgccactgaccagcagagcgtggaagttcggtgcgtttcagtgcctgcctgaaagcttggggacaggagggctgtccacaggtggtgccccccgcgggccctggccgcttctcctgtggggcccgcatgaccctctgctcgggcttgggaagaaatggagcctaccaggtgctgggttgcaaccccgctgcccggtgtggaccccaagtctagatttaggcaccccttgctttctgtcttttattttttatttattttgagacagagtttcgctcttgttgcccaggctggagtgcaatggtgcgatcttggctcaccgcaacctccacctcccgggttcaagcgattctcctgcctc[131 bp omitted]gcctcagcctcccaaagtgctgggattacagacgtgagccaccgcgcccggcctgtcttttaaataattatgaaaaatatccccccaaacaaaacacaaacatcaagttggggaggctggccgggggggacaggcaattgcatgcttgggtgctggggacggtggctggccgggccaggggactgagaggtcacagggagccccaggcggaaggcagcccgctcctctgagtctcttctggcctctccagtgcccatcagcgtgtgacctcctcctcccagaaggcggggagaggaggggctggcccgagaccaccatctctctgtctcggcaaccaagaagcagcggacataaaacccaagagcgtttaaaaaaggataaaaggcgtcggggcggtgaaggcagcggctcctcggggctggccagcgctgggcgggacaaagtgcctcactggggcccgcgggccactcagtccctcccgcctggttccccgcggaggctgcagccacttgtgctgtgatgtggcggctcccggtgggcaggctcagaggtattcctgtagaaagtgcagcaacgtgacttcatagtgctcgcccgactcggggcagcgaatactgtgtctctcgttggggtagatctgcggggagacaggaggcagggctggggggcgtggccggaccacccccgtgtcctaggctcctcccttattctggctcagggcatccgggaaggcgcaggtgctctgaggcccagtgatctgggtttgaatcccacctcggctgttgacttgcagtgtaactctgggcctctctaaaaaatggggtgaatccggacctcacagtctttgggaggatttggtaagacaaagtttacaaaacgccttgcggtgtgcacgcgcttgcacagaggaaagatttaggaagaaaccgtttgcctctttcccccaaaccggctgacgggcgaccaactcatctctgtggaggtggctgaggcttcaagcctcagggacatctggtgccctggtctcgagccatttccactttaccaaaaggcatgtgactagctctgggccttaggacagctgcctgtgaggatttgtgaagcattttctgggtcctcttagcgcccaagggggatcaagccaagaggcaggcagtaacatggaactccccaggctcctgagacctggaccagccaacgccaggcctgggggtggatccacacggggatgcaggtcctgcctctggccacgaaggagggctctcgaggcactgacggacaacccctatagctccccactgccccctaggggttggtaggaccaaggcatgaaaataaccctacgttctccacaaagaaccccggggctggccggcagcaggggcaggtggcccatctacgccacctcctgccagtgagatgggtttctgaatcatcccctcctctccaggctcctggtccccactgttgcccatcaccctgggaatgcaccaagccacccactggtttcccctcctctactcttgccttctttaatccatccctggatgaatcacgagtttgatgacaccgtccccagcctagacctctgcaaggacttgccagtctgacatcaagaccagcttccaggtcctgctgccccaggcacttcaagggcccactccttccccagcccgggcagtggcactccctggggcagactctgctgcccttgacaccagccatatgcacatgttgtgcccatgcctttatgccactctgggtcccagctgcctggttactttttcctcttggctaagagggcagatagagggtctgtctggctccccaatgagcttccagaccaagcccaaggcccggcatgtgacaaatgtgatttgtgtataaagagggcctggggccgccagctgcctggcccagatgttttggggtctttgaaacagaaggagaggtgcactctatctgtcccacacaatgccatgttcccaccccacagcctatctcatctcacgttctacttcctgtggggaggcagtgagacaggaccctgggcccaccctgtgtgctgaatgcttttcttttttctttcttttcttttttttttttcttttgagacggagtctccctctgccgcccaggctggagtgcagtggcacaatctcggttcactggaacctccgcctcccaggttcaagcgattctcctgcctcagcctcccgagtagctgggactacaggcgtgtgccaccacactcggctaatttttgtatttttagtagagacggagctttgccatgttagccaggctggtctcaaactcctggcctcaagtgatccacccgcctcagcctcccaaagtgctggggttacaggcgtgagccaccacgcccggcctgaatgcttttctgaagaccttgtttggccccagcagccttcaaggaggccgagttatcatgaccgtttcaaagacggagaaacgaggtgcaagggtgaatgctgtcccagctacctggcccctgggaaggcagtgggctcgggtctcaggctgggaagagacatctgaagttccattccagccctgcctgatatcactccctgggctgcttgggatgtggggtgtcggtggggggcaccgccaagagatcagctcatcaccgcacaaggtggctctgcctccctcctgctctgcggccccatttccctgctctgttgaaaggcaacaggacgctccccacaggacagagcatgccgaggcgcccaggaagcagaaattgtctgcagtccacaggtaataaaacctggccctcttgcctccaagatacctcctgaatctcccgccggtacaactatggaccacgtcccactgtcccccacaggccatccacaaagcagccagagaaatgtgggtcaaatggcaagccgcccaactctatgctctgctcacaagcccgagtcacctcccaccaccctcagttgaaaatccagccgaagccccgcccccgctgaggccccacccctctatagcagaagctccaccctgcttactgagggccccccctcctctacagcagaagccccaccctcctcaccgctgaggcgctgctcccacaccgagccccaccctctccactaccgaggcccttccccacaccgaggccaaccatttactgcggaagccccacccaccgtaacactgaagccccgtccctctgcagaagtcccaccctcctcgccattgaggccccgcccataaccatgcccaccccttagcgcagaagccccgcccacctagactgagccccacgttgctgccaaggctccacccactcccccactctcctcccgctcggtcccccaagcctggctggctccactcactctagcacccttcactgctgcctcctcagggaatgcttggccccagcgccttaggaaggagcctgctagggccttcagcactcagcggtttcttctacgcaatttctcagtttcaaataaagcccgtctgcggggcaatttcggtaagggttcctccctccattaggcccggagcaggggtgggtgtggcagcccccgatcccgtgcttccagcaccgaaggcaggcggaaccctgagctgtcaagacaggactgatacatcaatggccctgggagctgggagggcggggacacagggctgtggggtggggggctgggagccccagatcccccagggagcccctggtcacagtgggaagccaccccgcctcgtcccaccccccactcccagggatctgtcggctcgcggaggggccgaagcccccaacagccacccacctggagctggtaaggtttccctgctcggatcagttgggagacgaggaagtttgtgtggaaaaagtgcacgttttcgtccaggaagccgtggaggataagcaagcggttgggcctggaaaacagatggggaagggtctgaggccagggattgtccgtggggtaggaggggagcagatcacaaggtcaggagtttgagaccagcctggccaacatggtgaaaccctgtctctactaaaaatatatttaaaaaaaattagccaggcatggtggcaggtgcctgaaatcgcagctacttgggaggctgaggcaggagaactgcttgagcctcagaggcagaggttgcagtgcgctgagatcgcgccactcactccagcctgggcgacagatggagacagcatctcaaaaaaaaaaaaaaaaaaaagatcagctgagtgtagtggtgcgcctgtaagtccagctactgtgcaggctgaggcgggaggatcacttgagcccaggaggtggaggctacagtgagctatgatcataccactgcactccagcctgggtgacagagcaagaccccatctctaaattagaaaaacaaaaacaaaaacccaggccgggtgcagtgcctcatgcctgtaatcccagtactttgggaggccaagctgggtggattgagtccagttgtttgagaccagcctgggcaacatggcaaaacctcatctctacaaaaatatttaaaagttagccaggcgtggtggtgcacacctgtggtcccagctgagcctgaggcaggaggatcacctaaaccctgggagggtgcagtgagctatgattaaaaaaaaaaaaaaaaaatgctgagcatggtggcttacacctgtaatcccagcactttgggaggccaaggcaggtggatcacttgaggccaggagttcaagaccagcctgggcaacatggtgaaaccccatctctattaaagatacaaaaattagctgggtgtggtagtgcatgcctgtaattccagctactgaggaggctgaggcacgagaattgctttaacctgggaggtggaggttgcagtgagctgagattaagccactgcactccagccgggaccacagagtgagactctctcaacaaaacaaaacaaaaacccacctaggtctgctgctgtctgtggtctggagtgtggcatgggctactggtgaggccaacacgcagcctcaccagaatcggctgccctagcccttcctgtccgatacgggagccagtggccacacgtcgccgttgaaattccagtttacattcatccaaattaacggaacttataaacccattgagacagagcacagatcggtggctgccccgggacagggagtgactgctaaggaatgggaacagggtttgacgctggagtgctggaaaggttctggaaccactgcaaatgcaccgagggctgctttaaggtgactgttaggttctgtgaatttcaccacaataaattattattttttgagacagagtctcgctctgttgcccaggctggagtgcagtggtgcgatctcagctcactgcgacctcacccttccaggttcaagcaattctcctgcctcggcctccttgagtagccgggattacaggtgtgtgtcaccacacctggctaatttttatatttttagtagacatggggtttcaccgtgttggctaggctggtcttgaactcctgaagccaccgttcctggcctattattattattattgttttgagacagtttctctctgttgcccaggctagagtgcagtggcacgatgttcgctcactaccaactccacctcctgggttcaagcgattctcctgcctcagccttccaagtagctggcattacaggcatgcaccaccatgcccagcttattttttgtatttttttgtagagacggggtttcaccatgttggccaggctggtctcgaactcctaccttaagcaatcctcctgccttggcctcccaaagtgcccaggcagacttttttttttttttttttttttgaattggagtctggctctgtcgcccagactgtagtgcagtggcgcacgatctcggctcactgcaagctccgcctcccgggttcacgccattctcctgcctc[132 bp omitted]tcagcctcccagagtgctgggattacaggagtgagccaccgcgcccggcccatgcccaggcagatttttaaccccctaggtgactgcatgggattccggggaacattttctggagacgtgccagaaaatgggaacactgttttctctccatcagagaataagacccatgtcaaaagcataaaatgggacatctgagctggtccctggccctgtggacatctatgtcctgaagcacaagacagaggctgtgatggggcctccagcaggatgcaggggagtgggggaggcttgcctgtgaaaagcagtgactcgaattccctcatctttcccagggcagggctgtgagcctccttccccagacaagcatccctgggtgccccttcctgcaaggtgcagtgaggagggagggtgggctggaggggactgtgaggcacatgcaggcagacgccaccacaggagcacagcggggaggctccacatggcctgaggctccctgggcagggccagctggggcaggagggcaccctcatagagacagctggtgccggggtgcaggagaagccccggggaggagcgcagggcagggcagtggccttactcattgggcagcttctccacgtgcagggccacggaacccgcctcatagccgtgctggttgttctcagggacgtccatgtagcgctcagtgtaccctgtgtcgtaggccatccagacggtgaccggggcacccgcgatggccacctgagggacacagcagacagatgggggcagagagagagagagaaacaggcgtcgggtcctacagccagcatcagccgctgtcccggggccgccctggagcccgtgaggagcgctcatgcacatggggccggcaaggaaggggccctcagaccgcgtggcccccgtggacggtgcgtggcatgggggtgggcagggcgccacaggcgggcaggtgcggcccctccccgccgccgcagagggccgggtcccactgcccgtctgcctcctcctcctcctcatcgccgccgccccgcagtgccctgactgccgccggcctggggcccccccgccgctctgcacaccatgccccacctctgcccatccgaggccggggtcccgggctcagcctcccacagagagctgctggcggggttttgtgcagccggatgccatcctgcggtcggcggtggcgggcaatgaggaggggggctcggccccgtggggctgctgcagggagaaacagccacgtggcaaggcccctgccgaggcgcctccccggtaggtgggctccgggtggcgcgggcggtgggcaaacgcggcgtagatggggaagggggcagggaggggcgtggctgaggccggccaggggtgggacccaccttgaacacctggggcttgtggattagccccatgagcgagaggaagcccccgtaggaccagccatggatggcaactcggctcaggtcgatgaagccatacttctcggccacgaactgcaggccctccacctggtcctcgatctccacctggccctgagggatgaagccgggcacctctcagtggcctcctcccggtatgtccctcccctgcagtgacacctctgctcctttcagggcgtctctccctcttggatgaaaagtggctcgctggaagccccctgtccttccaggccctgctaaccctgcctgctatctggggatggctggacagatccagcagccatcttgctctgccacctcccaggtgagtggctctgggagccacgtcccctctgagggcgtcagtttgcccatccctaataaagggacattaacaggaagaggacccattttctagagggcacaaggaagaaaaagacgggtgcccaggcatgtgcaagggcacaaagaatggctggtgccatcgccgttgtcactaccagccacatccccaccaccgccactgccacgatttcaatgctggtgtcccctctgaagtccgtgctgagatcactactgcggccttcaagcgactgatccatggggcccactcatgtgaatgggatgaggggcccttataaaagggcctgatggagggaggccacggcttttccgctccttgcaacccctctgccgtgtaggaagcagcacagggcctctctggagggttgctgaccaggcaacctcgtgggaacagagagcagccctccccgacacagccctgccttggccttggacctcccagcctccagaactgtgagagattttcgttctttataaatccccaggctgtggggttttgttccagcagtgcaaaggggccgagatgatcgccatcaccaccgtcgtcatcaccagtgtcagcacaacttgtctctgtccctgcagggcgcagcccagagctgagcagcaaagcatacatccccttttgttctaaaagggcgcctcattgagcctgcgtcaccccagccagaagtgcccttctgcgggtggtattccagagccgctcccatgccctgcacccacacggcccagggctcccttcccgagacccaaaggacccagagcaacagggaggagttgttaccatttggtttttcagggccccttcgaaccgaagccctcgctgacaggagcccctgccgtcaatcacaaccacggcgtagcccagggaggccagtgtgttgagccgcaagtacttgatgcctttgaaggagttattcaccagctgcacctgtggggaggtgagggccagcagtccagcacgagatgccgggcaggacgggcctggcaggggagatgccggtgggctggggaccgggccgggctggggcctcagagcctaatgaaagcacctgtgccccggaggctctggatggacacctgggagtggcaaggcgggaggggcccatactcgggaccctgctagggagggggaagggccactgtcaggctctttctcagctgggccactgccccagtcctgcctggaacaactactctggcatgatggacattggggtggctccttctcgggtggggccatctgggcactgcggggtgctgagaagccactccaggccaggagaactcgcagtggtgatgaaccacaaagtacccagacatcgccccgtatcctctgtggggacagagctgctctgggtaagatgtgcgcctaagatggtccaactgccaatctgctgcctgcttttgacccctgctccaggaattgggcccagggcccatggccacctccataccaacctggagactaggggacttcctagaggaacaagggagagtcagcaggcggagggggaaggggaggccatccaggaagggcggggagcgtgcaaacgggcacagagaaaggagggtgaggggccccgaggaccctgtgtagtcagggcaggcggggtgggctggggcaccaggcaggtagccggggagcctcctctggttgactgttctacagctggcacttgagtggggatggggagtcctcgggtggatggtggggtgggggcctggggagcaggtgtgcactcacctgggggcctccatatacaaagaggacggtggggtgcttcttccctggctgcaaggcgtggggcttgtagatcatgccgtagagccgcacatccgagcgcgtgtggaaatggaagatctctggaggaacataatccggggggcagcctgcgggagacagggcggctatctggctgcccggggaagccacatccagctgacacccttgttctcctgcccaccccaagccttggagggtggaccaaagcaccccctcttttcctgggcttcccgagagttgataattgaaaaaaacgtttttttttcattaaataagatttgtacagtttttgtagagatggggtcttgtctccctgttgcccaggctggtctcgacttcctggcctcaagcgatcctcccacctcggcctcctgtgtagggtcactgctatttttgcaaagcaacagttgttgtccaattaggatggtgggggtttttctgttttttttctttttcttctttttttttttcaagacaaagtcttgtgatcttggctcactgcaacctccgccttcctgggttcaagcgattatcctgcctcag[134 bp omitted]cggagtctcactctgtcacccaggctgcaatgcagtggcacgatcttggttcacggcaacttgcacctcctgggtttgagcaattctcctgcctcatcttcccaagtagctgggattacaggtgcgcgccaccacatttggctaatttttgtacttttagtagagatggggtttcaccatattggccaggctggtctcgaactcctgtccttaggtgatccacccacctatgtctcccaaagtgctgggattacagacgtgagccaccacacccagccatcgaactcctgaccttgggtgacccgcacaccttggcctcccaatgtgctgggattacaggcgtgaggcactgcacctggcccaaagttttttctttaaataaatgtatgtaggtaaattttggtggggcaatttataggaaggtgagtaaagggtactacaggtctaggggtagcagaagtttactgtggagggccagatagcaaatatattgggctctgggaattgggcgtggcgggacacgctccgtgctgtgtctctgtgtcatctgctgcggtagcgctaatgtggccacagaccacagagggactgcacgtggctggatttggcagcagttggcctgctcctaatgcaggcagtcttcaaacgtggcacagattgggagtttcgggaaacagtgcctcgttccccagggcactgaggttctggtctctgcccccactgctaggctgggtgccctgctgagccccttcccctccctgacccatctcctcatctgaagccagggctccagctcctggcggtgtcggtgcggacaggagagtgaggactgggctctagagggaggcctgggatctgtttctgctcaggggtgagggcatcacaaaatgctttccagcccacggaataccccgcatatgctggaaattcgttgtgtttagaatgttctggaaacccaccaacatggcagagacagggccagggtgggttgtccttgtactgagtgatgcctgggagcccagcagtgtgctgacccgctggttttcatcccacactctgtatatacagtttcgttgataaagaaacacttcatggtgatacgctgatgtgtgtgacggagccagcactggaacccggagtcaccaatgcagggtcctggccaacttccaggttctgggcaaggtgtcaggttgcctcatttcctgaggcccccctgtgactgaccctttgctccttttcctgataaaggcctcggagtgtcggctctgagcaggtgctgctgtgggcggcagcctctgggcacaggacaccataaagggccctctgcatgccgctgtggccaggactgcagggtcctggagaaggtgagtggaaagcctgataaccacggcgggtttcaaaccagtgtgggtggactctgacatcccggccacccctgcatggaccaccactgttcaaaaggttttttttttttgagacggagtctcgctctgtcgcccaggctaaagtacagtggtgcgatctcagctcactgcaacctctgtgtcctgggctcaggccattctcttgcctcagcctcccgagtagtgggactacaggcgcccgccaccatgctcggctaattttttgtatttttagtagagatggtgtttcaccgtgttagccaggatggtctcgatctcctgaccttgtgatccacccgcctcagcctcccaaagtgctgggattacaggcatgagccaccgcgcctggcccaaaatgtttttaatttttaatttttttttagagtcagggtcttgctctgttgcccaggctgaagtgcagtggtacaatcacacttcactgcagcctccgacttctgggcacaaatgatcccccccatctcagtctctggagtagctaggactacatgtgcacactactacacccggctaatttttaacatttttgtagagggagttcttactatgttgctcaggctggtctcaaactcctacgtgcaagcaatcctcctgccttggcctcccaaagcattgggattacaggcagaagccactgtgcccgctgatgaaaatgtttacttgtcacctgcccactaccctgggagctcccagtgacagggtctgtgtctcactggttaccattttggcagggggttggcacggagctgcatccctgccgggttctgtgcagtccggccctttactgcagctcgaacccaggaccgtctcggacggcaggggctgtggcttatgtcctatgacgagttcccagatgcttggaggggcctgggtgctgtgggaggccaggcaggccagctccaggcctctgcctctttccccagcatggggccctcgtcccgttttacagccgggcgggcggaggcctccgtggggcggggcaggggctactcactggctgcctccatcatgctagcccagaagcggggctgcttgtgcagggggtcgtcgtcggggccgctcagcttgtagacgtgcacgcagggcggcgtgctcacgctgctgtagtggctgacgaacatgtcgaagttctgggggtggaatggggtgatgagctccacgggatgccgctgcgccctttccactgggtgccgaccgcagatccagggtagcttccctcccgcccgcccccatccctctgcccctgcctgtcatgaaacctcaaagctccacccgctgctgcaaggggggcaccactgccatcgccccattctgcagagcaggaaactgaggccaggacgagtctgtcccccagccaggggcctatggacagtcaccgaccgctggatctgccgagggctctgccactgcacaggcctgcaagcttgctggctccacagctggcaaactgcagctgactcgtgccctggactaggggtggccctctgcatggccaccgcctgacattctagaatgttctgagaggctaagggccacatcccaccgcacacagagcggcggagccccagctcagcggacgggcactggggggctccaccacttactaccctgggattggtggtgggcaattcactcccttccctgccctacccaggaggcaggggtgggcactgcctgccccaaggcagctatgagaatgcgagaccatgagaatgaccctgagtgctgtgccgggccatgagggactgctctggctgggagctgttggacgggcacagggcggtgccgtgaggctgggcggtcccacctggctcatggagcagctatgggagaagccgggcgtggtgaggcgtacgatctcgccggccgcctcatagctgaccacgtagaggtggtgctccagcggcgtgtccttggtgccctggaagtacaccagcttggtctcctcattgacccagatctgcagggggacaggggatcctcgtgatgcgtcccagatgcccctgggcccacacccctctccacgccccacaggagtgggccccatgttcctcggactggggacgcatgctgtcctcgcccaagtctggctttagggctggagatgaaccatccctgagagatgcgcttatctggccccgtgggctgggagcagcccctggtcgagctgggaactgcgtgtcctcaggcgggacctggggcctgcattccacccccagacagctctttcctagcttgaattgggagggcccaccagagccaggtgggaaggccagggagggcaccgtgcccgaaacagaggctcagggaaacccggcagtccccagcctggtcagccgttcctccgacccaggtgcttgggttcagaagtggcagggccctaccttcctgtgggaagccccagtaggccccgaagtggtgtctcctggaggagtgggagggcagcctgcactgcgtggagcagcggggcccctccttcacctgtgctgggatgctaatggtctcgaaacaactgctgctgcccaggagcgagcaggctttggctgatgcctggaaaggagccgggaggcctcagagccccgagggaggagagggcattgcccctgtgcccagggcctgagaggccggtggaggcagctggagcgtggggtgaccagggaccctaagacgtgaagaaactgaggataagtggtctcctgggacagcggggcacaagcttccagtcgggggagcatcatgccccacaacaaggcagctggacgcatggccccagacggcctgcagaggacacacttcctctttcatgatttctaaaaggcttccaatgttttccttaatttcagggtgaaaggataaagcacgtgaatggcacaacgttcaagatgagacggggaggtgatgaaatgattggcttgtgtgtatggtagacaccgtgctgaggcctgcgaactgctgtaaagcagggtcctcacaggtgtgtgtgcgtgtgtgtatgtgtgagaatgagtatgtgtgtgagtgtatgtgtgtgtatgcgcgtgcgtgtgtgtgtgagtgtatgtgtgtaaaacacacatgcatggagcaggggaaggctgcaaggagaccctggtaccttggagccgtgcctcgccaaaacctcccattcaccgctggtcagagcaatctcttccttaatggggcacttaaattcatctggaaagaaagaaagaagggaggtgaaggggcctgggaggtgatgcaggcgcccaaaggcacccaggccaaattccacccgagcagactcaccatggagccactgaaaccccggcttgctgtgaactcagacgccagcacaggccactgcgtcagacctgccacatgggcaaggaagcctgcggggcctgttcctgccatgtggatggcaggcccagtgtttcccacgataaaccaggagacccgtggctcactcctgaaatcccagcactttgggaggccgaggcaggaggattgcttgaggccaggagtttgagaccagcccgggcaacatagggagaccctgtctctccaaaaaaaaaagaaaaattagccaggcgtggtggcgtgtgcctgtggtccaagctacttgggagattgagctgggaggactgcttgagccaggaggttgaggctgcggtgagctatggttacaccactgccactccagcctgggcgacaacaagaacccgtctcaaaaaaaaaaaacaaaaaacaaaaaacaggaagagaaaccaggaatctggattttcattggaatttcccaattttagaaccctccaaaggccacatgacatctgtgtgtggcacgggaaggggggcggggagtgtgggggaggagccaactgggcccatgacctcttaggacacattaggactttgtaaaaccagactttttttttttttttttttttttgaagacggagtcttgctcttgtcgcccaggctggagtgcaatggcgtgattttggctcactgcaacctccgtctcctgggttcaagtgattctcctgcctca[133 bp omitted]cagcctcccaaattgctgggattacaggcacgagccactgcgcctggccgactttttttgtgggggcgagggggtagagacagggtcttactatgttgcccaggctggtcttaaactcctgggctcaagtgatcctcccacctcggcctcccaaagtgctgggattccaggtgtgagccacatccccggctggaacaagatgctggtgaaagcgctagggctagagaccaaggctctgctggttttatgattgtttttttggggggtaggagggttgacttcatgtttgaattttcaccaggtaaagaatgacagtgcggggtgcatcatggcacacagcagaaacacactgagatggtttgtaactgagggctcactgtcctttcctaaccttttaggtctaaacaagctacggcaaacgtgtctgtcaggagcacgggagggcagatgtggtttccctggcgtagaggtctgggtgtggttacttgtggcatcggggcctggggaggagagcggttcccacccagccccaagacccaggctcctgcccgcgtcccgacgtgttccttctgatgcaatgtcacttggggtcacctcctcgccatgcagctgctgtctaggagatgcatggtgtgtgctgggggctgagcagggtgctgggaaatctggtgtgcccacctcacaggccgggggtccctgggggcactgcagcagcctggagggtctgtgcccctggagagtggcagctgcagctggctccacttgagaccacatttgaaacgtgagcactcgggctggcccattttcccacagggggcaaaatgagcatttacatgaaatcccaatgccagatggcggtggctgagccagccagacagaaagtgaaacaccaatgagccgaagacagctcccctttgagacgcttagccagtaagtctgcactggccgcatcccacccaggaggaccccgatgctggcctgaggcagctgtcaccccgccggtccgcatcatactcagctccgtggcagcctacagcatcacctgtccctggctcattcgcccttcagctcctgcagtcccggatgcctcgctccctggggtctctgtcccctgtgttgggggacgccttggctgctgtgtgggctctgcccccagagggcaccggaccacatctagggacatctgtggttgtcacaactggaggtgctcctggcatggagtgggtggaggccagggatgccacttggtgcacaggatggccccgccccagagaaccacccggccctggcgtccatggtgtccctgctctaactttgaagagcctgggccgggctcccggaccaccccacctctctatccagaagtgacccttgggagctctgtcccatcccgaggctgacactgtcagtgtgcaaggacacctgcaatcccaccaggagtctcggttccctgagctccaggcacgggaactggcccatacagcatctccactaccgggcacctcaacttgaacacatccaaacccgactctggattttttctctcctagaacagtccctctctgagtctgtcttagactggacctgcggagccctccgggcatccatgccgcctccctcctctctgatcccccaccctttccactgcaaacggtgtgggctcagctgtccaagcacatccagaatcagacccaccaggacagctcagccactgccatgacagcaagcctgtcgcctctcccggcccctgggcctgtgtgcaagctgcaaccagaggagtcatctgaaactgaggtgagggtgacgacttcctatttctctcggggtcaaagcccaagtcctcctggagccccagcaggccctgcaccatctgctttttctctccccaccctctcctccctctctccccctcctccctgtgctccagccacaggggcctcctccctattcctccaacatgccaggaacagtcctgcctgccccagggcctttgtacgggctgtggctctgcccagagccgtggtgtggacccctcacctccacagcatgctctccagagacgtcctcatgccctcccgttgtagaaagaaggcccctcaccctcaagcctctcgcccgactgcatttccttccaccacgcacatcacaccagaggcagcacctctaactgtttctggaatactgcctcctccactagaaggtcccaagagcagggattttcctttttctttatttacagtgaacaattccatcacagctacctacagcaggagctggcaaatgtttctacaaagggctagacagtaaatcttggccttgcacaacagtttctgctgggactacccagttctgctgctgcagcacaaaagcgaccacagacagtctctgtaaacaagtggctgtggctcagtgccaataaaactttatttatgaacacaggtggtgggccggatttgacctgtgggccgtaggtggccaacccctggttgtgctaagggcctggcacaggggaggtgctcagtaaatctgctgcctgaataagccaacagttgggtgctctaagccctgccagatcatgcagtcactggggaaggctggcttcctgccgatccctgttccttctcccgcagggtgtgctggctgagtgggggggccgaccaatgaacaaacagcatattgaaccacacgtgactaacgcgatgagtcgacagcattcgtcaggctctgctcaccttccccggggctgaagggctcactccaatcgtagccctgggattttaaaacggcggtgactttgtacaaatggcagaagccggtcttgcattcattggcgcggagaaagcagagctcgtcctctccctctgattgggggaagggatagaagatgtcatgaacctgtccggaaagcagatagaagatgcgtcagaaggtgtgggtggccgggcatggtggctcacaccagtaatcccagtagtttgggaggctggggcaggagacttgcttgagcccaggaatttcagagaccagcctggacaacatagtaagaccccacctctaaaaataaataaataaattagccaggcatggtggtgcaggcttgtggtcctagctactctggaggctgaggtgggaggatcacttaggcccaggaggtcaaggctgcagtgagctatgaccacaccactgcactctagtctgggcaacagagcaaccctgtctctaattaaagaaaaaaatagatgaggggagaggctccaatggctgccagactcaccaacccccctagaccctcttccctgccagccagggatggccaaggcctgagctcacttctccacacaagggcaaacaccacctgccattggcgctcagccttctaggacgtgggggtggggacagtgtgactccagggcccaggcgggcatacagccagcgcttgccccgcttacattgatccagacgttggtgacctcctcgtacaccacatacggctggacattcctggggacagctctggcagaggctagccgctgctcctcattctctgtgctcgggatgaacagggccggggggaggaggacgagctggagccactgctggggccggtccaggaacatggcccaggcgctaagggggaagatgcgggggaagatgagagggaagctgggagcctcagtggcctgcacagagaagctggggacgcagcgtccaaacccgtgtggaatcagggctgggcttcctgcgctggcttcacctgcacttggccaagtaaccctgcagcacccacaggcttccttcctggcacatgcttaggggaggacaggatgggtgacaagatttcatgatccaagtgttccggaaacaatggcctaagtctcacagcggcaagctctaatagtttctcctcttcactgactcttcggcccacagtcgctatcctttatttcgtagtttgctttattttatttatttatttctttatttaattttttgagacagagtttcactcttgtccaggctgaagtatagtggcacaatctcagctcactgcaacctccacatcccaggttcaagcgattctcctgcctcagcctcctgagtagctgggattataggtgcctgccaccatgcccggctaatttttgtatttttagtagagacaaggtttcatcatgttggccaggctagtctcgaactcctgacctcagatgatccgccagccccagcctcccaaagtgctgggtttacagacgtgagccaccgcacctggcctaaatgaacaatttttaaacttgaatttattttaagaggagatgttagtattctacgtggaaaagcagcacctccacacacagaacaacgaaaaccaaaccaaagggaagcatcacagggacataaaatactaactagagtgggtgcctgggctcaggcctgcaatcccagcactttaagaggctgaggtgggcgggtcgcttgagcccagaagttcaagacctgcctgggcctgggcaacatggcaagaccttgtctctacaaaaaaaaaaaaaaaagtccaggcacagtggctcacgcttgtaatcccagcactttgggaagccgaggggggcggatcacaaggtcacgagtttgagactgtcctggccaacatggtgaaaccccatctctactaaaaatacaaaaattggctgggcatggtggcacgtgcctgtactcgggaggctgaggcaggagaattgcttgaacctgggagtcagaggttgcagtgagccaagatcataccactgcactccagcctggtgacagggcaagactccgtctcaaaaaaaaaaattaaaatattagctgggagtggtgactcacacccacagtcctagcaaatgtacatatggcagcagcacataatagaattcattgttaacattccattggaggcattaaccaatgcaattagaaaagtgaacaggctaagaggcataggaatgcaaaagcaagaccctcatatctataaaaaatacaaaacattggccaggcatagtggcgagtacctatagtcccctctactcaggaggctgaggtgggaggattgcttgagcctgggaattcggggctgcagtgagttatgatcgcaccactgcactccagcttgggcgacagagcgagactccatctcaaaaaaaaaaaacaggcagaggctgaatttgcccactggggtttggggcccccgtttagggaggtggtagagttctctcctcgacatgggtgggaggctggggagtgagtacaggggagcacctctactttgtgactcagtttttctgagcctgaggtctggggacacctgaaatcccctctgtaggtctcctccacactctgggtaactggatcagcatgtcctagtggcactaacactgggactcataagtccagtgtttcatcctcagactggctgaggtcaggagggccctttggacactggtctgaggcctgtcctggcggttgcactgcgggaagacgtgagcagatggaaggaatggcacggaaggccaggaggcagcttcggtggctgcccagggcccagggccctgcaggtgaattccttgggttccagccagagacactcactatttgccatcccgggtccacccggccctggcgatgtactccaccttcgggaacagcgagctgaagggctgcaccagctccttctcctgggtcgagacgatctgaagggaaacaaacaggtgtgggtcatgccctggcctgcccggcgctgctcggaggagaaggccactgcgctgggtcccatcatgtcccccccaaattcatatgctggagtctcagcccccagaaccccagaacgcaaccttctttggaaatggggccactggagatgtactgagttaagacaaggttgtgtggatgagggtgggccctgatccagcatgactgctgtccttacagggggacacatagacatagacacatagagggaagccgtcttgagaagagatacaggaagcaacggccaccaagaagccatggagaaggagccacctgctagcagcttggtgttggacattatcaatttcggccgtgtaagcctcccagtctgtggtcctttgtcatggcccaaacaaatgactacacccaacaggggcaggtgggctgggcaagccaacggcggcaccccagcaggtgcctggacccaaaggctctggtctgggctgtcccttagagccaggtggctctgggcaagcacagtccccggacccagggcttccccatgcttaaacagggctggcacggcgtttccagggtattgagagataggggacctgagccttcctcgtgtctaaatggggctggcacagcatctctggaggatcaaagggagaaacggcagcagggcctccagctctaccacttgagtgggtcaccagccccacatccccaagccgacttgtttgattggcatcaccccagcccacctaaggactctgcacgtctgagagtgcaaggagccactaaaacagcctggcggggccaggtgcggtggctcacacctgtaatcccagcaccttgagaggctgaggcaggtggatcacttgaggtcaggagttcgagaccagcctggggaacatggcaagaccccatctctacaaaacccacaattagttaggtgtggtggtgcatgcctgtagtcccagctactcaagaggctgaggcaagaggattgccttgagcctgggaagttgaggctgcagtgggtcatgattgcaccagtgtactccagcctagacgacagtgagaccctgtctcaaaaaacaagaacaaacaagcaaagcaaaaccccagcctggaaggaggtttcacgtgcatcactggcaaagccactcagactgatcacctaaaatctgccagaatgctactgtcaagaatgcaaaagaaggccgggtgtggtggctcacacctgtaatcccaacactttgggaggccgaggcgggcggatcacgaggtcaggagattgagaccgtcctggctaacacggtgaaaccccgtctctaataaaaaatacaaaaaattagccgggcatggtggtgggtgcctgtagtcccagctactcgggaggctgaggc[138 bp omitted]agaggtcctaatcacattatgtcatttttgcaagagcacacaagggcctccttggtttgtcccagcccttccatcctctggtgcaggggaagggagggtttctctggacgcctggtgtccccatcatcatctgctctcctctgccccagcctctttggcccagggctctgtctgcgagttctccaacatgatgttacttaacttcctgacacccttctgggtcttatgggatttgcaacttccgagagaactgatcaatgtggggctattgggggtcccctgggagggcagggatgtgagagaagggagggatatgctgggctgcagggggtggctacggaggagggggccgagggagatgcggtcacaggtgtggtctgctggtgaccgccttgctgcggggtgatgatgccttttgctgcctgatggcgcctccaggctgtggggtcctttgagatgacccccaggtgatgaggaccctgtgtactagatctgaggaggtcggggggatggggatccagaacactctcctccccacagtagctgacgggtccggtgaacggacctgaggatctgcctgaaacgctggaggaaacagcccgtccgaagttggggtcccccagccatctgccccacggagttctctgttctggaaacttggagagagggcagctctggatccacacgtcacccactcccgaggtggcctgggagcacctgccgcgcctgtcctcgcagggcccctgcccggtgcttgttccttaccgcggcgtggcctccagtctcaggacccactctgtgaggcagggaggccagctcgccacgccgcattctaggcacaggtccagagacacacagggaaggcctgtggctaggcggaccgggcggcagggctggggcctggggagtgcccccgagagggaggtgagtgacctgcccatccacccagctgcctacccggcccttccccgcatcatctagtagattatctggtatgcagcaggcccccttaccttgccctggctgtcagtctggaactcagccagtttcaaggcaatcttgggattcttgctgcctgcaaaaaccgaagtgaggtgaacaccaggcaggcatcacccgtgtgtgccgagagccggcacggggggcctgggctgtggggtgacgtccacagagaggtgtacaattggagtgggggaggcaggagaagccaggtgtcccacggtctgtctgtaggcacatcgtcctgctggaacaggcatgacaccctcaggtggggaccttctgactttgggcctggatcgcattcccaacagtgatgtggcatctggctttctcatttaaaaacacgggccacaccctgtgctgagagctggggcttgtaggggccgcagataccaggaagatgccatccctgccttgggagagctccagagcagacggtgaagcccgaggcatcacagtaaaactgacaacgtgacaagtggggtgtgtcccatgcaaaaccagggagcccgtgtgacagccagacctgcgccctccggaggccaatggcgacagaataagggacccaagaggcttctgaagagtgggacttagttcaggctccgaaagagggcgcgggccacagcagagcggagaatgcttatttttttggctagacctacgagaaactcaactccagccctcgtggctctggcctccagggcaggtgacatctctgagcctgttttctcatctgtcatacgagggggaaaagactgacttagctcatttgcagtgggagttggaaagaccgtacaggaagcttccatctagcacggcacagagcaggcactcgcggagtatgggcaataacgatgctcttatatggtcccatgggggttgcaaacccaaggcctgaacgcggaatctgggctgcacgtgtgttctgtttggctccagagatatttttaaataattggaaagatgtttaagaattgggagtggccgggcgtgtggctcacgtctgtaatctcagcattttgggaggccgaggcgagaggaccacttgaggccaggagttcgaaaccagcctgggcaacaaagcaagactccatctctacagaaaatttaaatattagctgggcatggtggcacacacctgtagtcccagctacctgggaggcagaggtgggaggatcacttgagcctaggagttggaggctgcagtgagctgtgattgcaccactgtactcctgcctgagccacaaggtgaaaccttgtctcaaaaacaaacaaacaaacaaacaaacaccactgtagtgtgagggccaaatccagcctgccttctgtttttgtatggctgaaaatccttctttcgttctgagacggttaagaaaacaaacaaacaaaacaagagtgacattttcgctaatatgaaaatcatatgtatctcaaggtgaattatttgtaatccaaacttcagtcaagtttccttggcacatggctacgcccattcctgcacgtgccacttctgtgctccagcagcagggtggggcagttgcaagagagcctgccttcgtctggccctggaagcctgagatacctgtgccctcatcccttccagagacagcttgctcacttctgagcaatatgatccggtggccatggtaagccaggagaaaggggcggcccctgcagggcagaagccttccttctacacccccatagatgcccagagcacacacatgcagctcagagggcctgggggacagtgcacctcaccagccatgccccaggggcctcagatccccggcccagcccctcacatgtaccgggcactcacctgtcctggggtaccgatacgagtccgtcttcctttcttctagcgcaggagaggggacgtgaatgacctccacctcggactcatcgacttcctcatacaggattcgcagcgtcttgaggccctctgaaccttgggtggggtggtggaaaaactgctgagggtgccagaggcagagtccctgccatcagcaccccccgccccctgcagcaccggggcctgaagatgggcaccgagggctctgaaaccagaaccccggctctgccattcgctagaccttatgccagtcccaactctctgggcttcagtttcctcccctgtgcagtgggaagcagagcagggctactcccagcatgaactggcatgggaagtggccacgtggggtgtaacgggctgaactgtgtcccctcttagggcaacagcgatgtctacagtcgttaaggaactctctaggtgttggtattgacagactgtggaggtggtttgaggtgaaaggagtaaggcgcaggaaggacacagcctgtgattccaggaggaaaagcacgcccgggagcatgttgaaaaatggaagggacctaccttcccaggaggctgtggggcaccaccagtacccagtgaagcggtcgaactcttcctgtatgacgaaggtggccacacccgcagacttggggtcatccaggacattggataaacctagggggagggacggagagcatcaacaaggggtgagcagcctgctaacactggggacagccaggggctcaaggagagcatgagagagagggagagagaaggagggaaggaaagggaaggagagggggagggagagggagggagagggagggagagctcggagccgactgctttcaagcagggttgctccaccccacactgtggacactggggccctcttggtctctggggtggggccgtccagggcacagcagggtgctgagcagtgtccctggcctccactcaccccatggcaagccaggagcacccccgcccaagtgtgccgtctaaaaacgtctctggacatcgccgagtggccaggtttggaaagtggggcccgggcttatgggacggagaggcagcgatcagtgacttgaaaccaagacaaggaaggatggggtcacttctgatgagcaagggagtggagagaacacgcaggaagcaggtgagatgtggccttgacttgatggggctggacaggcagagtggaggggaaggtgtgcaggggcagaaatgcccaggggcacctggaagagggtccagagcaccgtggctgggctgacgcctgcagcagaaaaccacagagcggcagggtgcggtagctcatgcctgtaatctcaggaccttgggaggccgaggcaggtagatcatttgaggtcaggagctcaagagcagcctggccaacatggggaaacctcgtcacaactaaaaatacaaaaaaaaaaaaaaaattagccaggcgtggtggcgggcacctgtaatcccagctactcgggaggctgaggcaggagaatcacttgaacccaagaggcggaagttgcagtgagccgagatcataccactgcagtccacctgggcactcccgcctgcgctcccgcctgggcaactgcactcccacatgggtgagactctctcaaaaaaaaaaaaaagaaagaaagaaagaaagaaaactacagagcggcagggacgccaggacctcccgggagacatggtaggctacagaaggtatgcacgggagggtggcttgtgaggggtgtgtgcaggaagaccctggctgtgggggcaatggggcctttctggaagctggccaggtggctatggtggccgtgcacaggaggggctggccccaccttggtggcagaaggtcagccgccgctcctcgcctgtctcgatgttggccacccacaggtcgctgttattgatgaaggagaagaaggcagggtcggcagggcagattttggggtccatccggggccctgagcactgggtcttgatttccagcggtttcataggggacacctgaggacagagacgcccagctcagggggaggggccctccacgccacccccgcacacagccagggccagggctcaccatgaagccgttcttgccgccgtcgcggcagtggaagaggctgttgctggcctggaagaggaagaggccactctcgctgtggaagtcgtaggaggtgatgccgaagacccccaggcgtttccgctccctcagcagctcctcctcccgagagtagaccccatggtggggcgtggcctggaaacatacaggggacagggggcagcgtcagtgggcaaagaggatctcccgctggccagggcagagatcctcgggctggggcattcccagggaatctgacttcgggcctcgccagagagaacttcctgtactgggcagaattggctgccggagcccttgacacagtgggtggccaaagattgccagcgaacctggccctgcaggactggctgagtgtcctaggaggtggcaggggagactctggggccagaagcctcctcacttcctgagttccctccccacagaccctctccatagcagatgggggcccctgggaggggctgtccctgccccacaccaccggagtactctctccgggtccctagtgccattcttacagactccccaccctcctaccctattcacaatcccttcccatcaagagctttcaatttcgtaatcccagcactttgggaggc[134 bp omitted]gaggcagaagaatcacttgaaccgggaggcagaggttgcagtgagccgagattgcgccactgcactatagcctgagtgacagagtgagactttgtctcaaaaaaaaaagcagaatcaaaagcaaaattacccctacactctgtggaaagcagtgtaaacacaaggacactggcttggggactcagagacaggccaaagtgagggccagtgaaccagtggtggagaaagtgggagtgtcacgatctcagccactgttagatatcattattgttacattgttatgtttatgttgttactatgttataatgttatgttatttttattgctatattgttactattttagagactgggattcgctgtctcccaggctggagtgcaatggtgagatcacggctcactgtagccttgccctcctgggttcaagagatcctcccatctcagcctaccaattagctggaactacaaggcgagtgccaccaggcctggctaattttattttttgtagagacaggctcttgctgtgttccccagtctggtctcaaattcttgggctcaagcaatcctcttgcctcggcctcccaatcatcaaacacaaaaacacgccaatcaatgcaaaaggcatttttcctccctcaactatccccagagagccaacactggatgagattgatgattaaccagtctctctaaaagggcctcaagccaagttaattcccaatctttggtgatgccgttaaaaggaagagatgcttttggtaagagtttctctgtcgcttgagtacaggtggtcagggggaggagggaaggctcacccgccagagtccacaggacggagggtttgtgggaactcacagccggtggggcagagaggtgaccgaaggcatgtatggcctgtggggctggcctttgccacctcctcgcccacggtagggcccacgcctaatagcacagcttacctggaaatgatccagcatctgcttccaggacaggagcagcagagcctctttccggaccttcttgggaatctcagagtagaggagggagttctctcggctgccatatggcattcctaaagggagaaaggaaacacccagaacgggtaccctggctcaggatggggagacgccctcagcctgcagctgggcccagctggttccctctgcttctagaacattctgccaggccgccggcgggacagccctccccggaaagctatggatcctgggtttgcttaagtaggcagtagggccttccacctgagatatttctgctgaatctcacggcct[131 bp omitted]aggccccgtctcaaaaaaaaaaaaaagaataaaataaaagaaaaaagaaagaaaaataaatcgcacacaagagaacaagaagggcagtcagaaacaaacatccaactctcaacaggttgggttcggctctccaaggccctttatcaaggcttttgcagacgacaagaatttaatataggattagagggagggcaaaaccatcaaaaaggaatgagggccaggcgacatggctcacgcctgtcatcccagcactttgggaggccgaggcaagcagatgacttgaggtcaggagttcgagaccagactggacaacatggtgaaaccccatctctactaaaaacacaaaaattagccgggcgtggtggcacgcgcctgtaatcccagctactcgtcaggctgaggcaggagaatcacttgaacctgggaggcagaggttgcagtgagccgagattgcgccactgtagtccagcctgggtaacagagcaagattttgtctcaaaaaagggaatggggaagcgtgcacctggtccagtatttcccaacctcgcccctaattacattcgggcctggaccatcctccggggtggggctgtcctgaccactgcgaggcgctgagcagcatccctgtcctccgcccactccatgccaggggcaccccacagtcgtgacaaccacacatatccccaggcatctcccagtgtcccctgcaggggcagaatcaccccgacctcaaaccactgatttaatcgaagcttctgtagaaaatgacggtagtgagagctgccaagcgagggttttgggtggattacatgaggtaagaaacgtaaagctctcggcacaatgtgtgtgaccctctgtgaaatcagcgtatttcatcagtaagccgcggctttccacctacgcatgtctctgggcttgggatgggtcttactgcggaaggcgcaatcaggtccttagtggcaaataaaataactgtgtattttccaaatggtcatgtcttagatctgctggatgacagtacaattgtcattagaaaagggaatggcagaagcaggatggtaacccctgggaagcctcggtttcccctctccatgcgacaccactgaaaaaccgggacagggctcctccaagcataaagctgtccagtagcccacaaacgtgacatgactaacgacaagtcacagacagcccggtgccctggcccctccttgctctactttcaaccctgagtttctccaggacgaagcctcggattggtgctgtcctgtcctcttttcaggacctcctcatactcgctttttttttttttttttttttttttttctgagacacagtctcgctctgtcgcccagactggagtgcagtggcacgatgttggctcactgcagcctctgcctcccaggttcaagcaattctcctgcctcagcctccagagtagctgggattacaggcgcccaccaccacacccggctaatttttgtatttttagtagagatggggttttaccatgttggccaggatggtctcgaactcctgacctcaggtgatctgcccaccttggcctcccaaaatgctgggataacaggcatgagccaccacacccggcccttgcttgcttttaagaggagaacaggaaggccacaagctcgccgcctctgggattagtgcttaattagtaatatctgtgccatttttatttcttgttacaggcagccgcagggtcctccagttcctcctgcttgctttctgtgtcctgactgaaaatcacagactgccctgacctctgtggctcagccagctgcaggtttttccctacaggcttgaaccagagcctagaacattcccaggcactgataaataccgaaagccagcccaggccctgagccaaaatccttaaaccctcacataaactccataccctgacccccttgccgaggacacacctggctgtagaacacgccttttctctgatgcccattgcaaggacactgaagcccaccctgcaccgaagaccccctggaaaatgctttggactcatccccctggcatttagggttcctttctttggaatcccaaccagccccatctggggacggttcagggcactcccttgtgggaactcctctgctgctgcttttggggtgactgtagctgtgggttcagtgggatgaaacagaatcttctcactattcacaacagcaaagacatggaatcagcctaaatccatcaacggtagactggataaagaaaatgtagtacatatacaccacggagtactctgcagccataaaaaagaatgagatcatgtcctttgcagggacatagatggagcaggagaccattatccttagaaaagtaatgcaggaacagaaaaccaaataccacatgttctcactttataagtgggagttaaatgatgagaacacatggacacatagagcagaacagacactggggcctattggagggtggagggtggagggggagcagcagacaaaataactatcgggtactagcctgggtgatgaaataatttatacaacaaacccccgtgacacaagtttacccaaagaacaaaccggcacatgtgcccttgaacctaaaagtttgttttcttgagagagagtctcgcactgtcacccaggctggagtgcaatggtgcaatcttggctcgctgcaacctccacctcctgggttcatgcgactctcctgcctcagcctcccgagtagctgggattacaggagcacaacaccacacccggctaattttttgtagttttagtagagacaggggtt[143 bp omitted]acttctagttgtggcaaggaacacaggtttcccacgcatgaggaagcgcgcttgtgaagtacagtagtgacggaaggatgtacttaaagaaaaagattagattaacagggttccttttaaagtgtatttatgaaaaatgcaaagttcagtgagatgtgtgtgggaaggagaaaaatcgtgcggagactcaggggtgagcaaaagaacgcaagtgctggaaacacgactcaatctctaagagcccttgaagctgccaggaccctgcccgtccggccgcccatggggatgagggtcaagtgatgtgtgatttcgctcgtgtgaaatgtccagaacaagccaatccacagagacaggaagtgggttcatggttgcccggggcttgggagtgatggttgatggggttgctttttggggcgagtgaatgttctagaagtagacaatggtgatggctgcacaactctgtgaatgcgtgactaaaagccactgagtttcacaccttcaaaagtgaaactgtgcaatgtgaattacatctcaatttttaaaaagcaccctgggccaacaggaggggtgggagggatgggagggcctgggcagctagtccacagggactctccaggagagctggagctttccaaacaggaaatcaaagccacagacttgccaaggacaccagggccacctccttctaggctgattaatcaatgatcaccaaatggcccctgccagcacattcctcgggcgagctgctgctggcactatgatggtgacaactggcctttgaggcaagggctagaggtgaccgccaagggctgtggatttctgctgccccatccctcctcggacctccctcaccagctctgcccctgcaaacacacctgatgccaacctgtcacccacccatgccccggtgacccaggcctgcgcaaacaccatttcccgtcactgcacgctgtggcctcgagtggctggcctggtgggggatcgtgatccacacagggctagggctctcccctggatctcagcctgggacgtcgggagacaggaattcttgctttccctttcgagggagttccagaactgtctggaaccctgtggcctcctccagccacagaagtcaccgtttgcagtggggagaggctgatccgcgtggggcgggagcggggtcgggagcgtttcccaatgctgcagtctgaggcctggaacctgagccggccccagcccatcttcccagcagcaggaaccgcacgttcccccgctgctcctgctagcctgacgctgggggctttatcatgtggatctgaaagagcctttccggaggggcccagtgattagctccacatgccccacagcaaacctggtgcctgctgaggggacaggtcccatgctttgagcagcaggccaggcctggccttgaagtctggacactgggctagtgctaagaagtgttattattactcaggggctggggggaggcctgccccgagaacctggatgtgacgtgagctcagtgctgcccctgacagtgtgaagtgacagcctggagtcgttgaagggtgaatttcaccccgaaaggggcagtctggtttttgagctactctaggtacgttctggggtttctgccaagttcatgcccactggggtgggccctcagcacctcctgtgtactgtgaggacctgcctgtcccagccccagacacacacacgagccacaggcgacccgacgatctcatctatgcggagtcaatctgaatctttgtcccggaaatttggagaaagttcctccgtttctgctggtggctagaacctgaggcatggaatcccaggcgctgtggaggggttgcggaggacaggtgggcagcgaggtggggtggacccaggcacggacagatgcctggcttctggaaggctctggttctcaggcgctgcttcctgaggtccactgggctttctgctcttgggttccatgagatgcccctctacctttactccaggagtacttcatggctcagacgagcttggagggtttctgtcccttttagcagctccacggagatttgaatgatggccctgacagagaggtgtccacatcctggggctcgggtgtggaggctacgttacacagagagacaggcctgtgcggctgggattaagtgaaggctcttgagctgaggagatgatcctggattacccaagtgacccagatggcatcatgagtccttatcagagggaggcaggccaggcacggtggcttacgcctgtaatctcagcactctgggaggctgaggcaggcggatcacctgaggtcaggagtttgagaccagcctggccaacatggagaaaccctgcttctactaaaaatacaaaaattagctgggtatggtggcaggcacctgtaatcccagctactcgggaggctgaggtaggagaatcgcttgaacccaggaggcggaagttgcagtgagccaagattgcgccattgcactccagcctgggtgacagagcgagactccatctcaaaaaaaaaaaaaaaaaaaaaaaaaaaggaggcagaggggaatttcagacagaagagaagaagaggaggaggaggaagctgtgtgaccatcaggccagaagttccaacgttgtggccacaagccaagggatgctggccgccaccagaagctgcaagaggccaggactggttctcctctggagcctccagagggagcgtggccctgaggaaaccttgatcttggatttctgccctccagaagtgtgaataattttcacaatggcagccacagaaaactcctccaaacgccctgaccaggacagcaaccccaacgggagcaagtggcccaagactgtgggcgccacaggataaaaaagaggcaacggcccatggcagccgtggtctgtacacttgtagtcgtaacagccaagctctctcaggtaactgaaactcaagccatttcagtccaatttctcccagactagagttggccagcattcttaaaggcccagacagcccaggtgcagtggctgatgcctgaaaccctagcattttgggaggctgaggcaggaggactgcttgagcctaggggctcaagaccagcttgggcaacacggcaaaacctcatctctacaaaaaatacaaaaaattgtctgggcatggtggcacgtgcctatagtcccagctacctggagggctgaggttgggatgatcacctgagccagggatttccaggctgcagtgagctgtgattacaccactgcactccagcctgggcaatggagtgagacctcatctctaaaaaaaaaaatgaaaaataaaaggaagacagtaaatgttttcagctacgtgggccatatgacctctgttgcggtgactctcctgctgtagcttgagaacagccaaagatgtcaggaaagtaacagggaccaggaaaacctgacttctgaagacggctgtcacctgccgacccctgttctggatgattcttccttttaaattctttgtttgccagaccaccatctgattcccacacaagtctgtctgtggagagggactgcgctgatggcggaagaagacagccacctggtgtccacctcggtcactgttgttagcatgtggtcagcctcaggcagaggatgacggccgttcactggttccaatgctggctgggggctgcagcacacgcgggcctgggctcaggggctgaggacaccaccatgagtcccatggatgagtgcagcggtctggacaaggatcccagcgccaccccacccccaaggaacacttggcgatgtctgaggacatctgtggttgtcaccactgggatgtggctgctcctggcatggagtgggtggaggccaggaacgctgctcaggaccctgcagtggccggacggccccaccccagagaacgatctggccccaatgtccatggtgccaagcgggagagacgctgcctttggtccccagccatgtgtcacgctgctttcaaagacacaggcctggctgatctctccaaggtgtccttcctcccagctcttaaggcctctgggtgcagtgggcaccatccgaatatccgctgcccacctcacgggagccaggcccacagtggctgcagaagctgctggaggacatgcagcctaacccgtgccctgaaggcactcgtggtgcagaggagcccagtcccgtgaggcactgcagacgctgcaggaggagctgcgtgcaggcacacgcccagaggaggaagtgtggatccagagcctgcagcaggggctgcaagcgcgtggcaagccgcccctgtgctgtcaccggcggcaaaccaggttctgccatccgggcggctttcccggaacctcgggatccttcttgacgcacctccacggcgagctcctcctggagttactcccgactccctctgggaatggttcagtccagtcctgtttgtcacgagccccacccagcccggaccaggtggctgggaagtgactcagggggtggacccggctgactagcactggaaacaatctccgggcttggagccacagggccggcttgagccacggcatcctggccacatggaggagcggggctgccctgtgcatggctccctgcacggctgaccctccgggggccgccccacccaccccgcggcagcccttccctgtagtcagagctgtctgtggctgagcctcgaaggacagcatgcccagggcccagccatccgagcagatcttccaactcctgtggacctctgggaacagagaggaccagggaactgtggtcccagatgctgtccccgcccaagcagcctgcagggcccggcttacccaggtagtagaggcggtgggagtggggcccagactcatccgtcttctgcacaaactggaagtcgtggggcgccttgttgacaatgaggcccgagtacttgcggctgccgtggatgatgctccggagcccgtcccacgagtgcttctgcacctggaagcgggcggccgggtcatctgtggcggctgcgtcgcctcggtcggccgttggggtcccggtggtggccatcctctcagccccctcggaattcagcgagaagctgcggggaggaagcaaagactatgagaaaggagaactgttttacctacgagctgccccaatgctgccccttgcgaggcactcaggttcttccagacgagccccacccctgccgctttccccactccctaaacacttcttgggttggtctacctctctccatgtcactaatgctgctaagattcaagccaccatcacctctcaaatgaatgatctttaaaaacattcttctttttggagatgggggtctcaactatgttccccaggctggtctcaaactcctggccacaagcaatcctcctgcgtcagcctcccaagttgctaggactgcaggtgtgagccaccatgcttggctttggctgaatgactgaaaccacctcccaccaggatgttccacatccactgccaagaccccatcacttaaaacccttcctggttttccacagtccccgggataacaaccagttctcaccaccacctcaaggctgctgtcgacccctgccaagcccttgaatctcatccttcttatccctgtgacccagccaaatgagccttcactcagctcctcaaacaggccaaattcctttccaccgcagggcctttgcacatgctggccctcctgctcggagtgcatttttcctcactttgcttaacttctttgatatatgtttatatatatatacttttttttttttttttttttttttttggagacagagtctccaaaggctggagtgcagtggcgtgatctcagatcactgcagcctctgcctcttaggatcaagcgattctcctgcctcagcctcccaagtagctgagattacaggtgcctgccaccatgcccaactaatgttttttgtatttttagtagagacagggtttcactatgttggtcaggctgctctcgaactcctgacctcaagtgatccgcctccctcagcttcccaaagtgctgggattacaggcatgagccactgcacccagcctgcttggccagcttctaatcagatctcagctgaagtacttggcaggccgtcagaaacctttcacaccatccacgctgaagctggtctttctgctcatctttcacacgccacctggctgtcccctccctccaccttcatcacagcggttatttgtgggacccctgtctcccccatgtctgtcccattcacagctgtgctcccagaaccttagctggtggctggcacgtggcaggcattccacggagcactgtggaatgattatctctcagtgggctcgcggggagacatgctgggtctcgggagaggcccgggcgtgaaggaatgaaaatccatcctggtcacctgtgctgttggcttgctgtccagccggggagatgcttggccttcactggaagttccagagcctcgggatgtgggaggtgcaggtgaaagggtgaatggcacgcccttccccaaagaatatcccactctctcctcccactcaggacactctgggtccgcaaagcagccaccgtgagtggccgccgcggtgtcacatctcccaccaccccactcccgccctcgtcacttagcacactccttgacctgactggactggccaggcaaatatttgttttacagaaatctaaacatggccgcagtgacccagttctgcgagagccagtggtctggaaagggtggcaccggggctggtctcgcttccctttgtgggctccgagtgactgccgaccttgccagaagccctgtcctccgggaccaacagcttggcttggggaagtcgctgcttgcttggaggaagtgggaaaacccgcgggagtggacagcagggactgggtgtgagagaagtaaagggcagagatgagtgggccgccttgactctgcagtgtgccagttcccagaagactctgcctcttgccaagaggagaccccacagggtaaccactgcaagagaaagggccccagcctgctttgagagggaaggggagaaagagctgcaaggatgtcaacgagcgcctttgaaagatcaggacttggccgggcacagtggctcatgcctgtaatctcagcacttcgggaggccaaggcaggaggatcatgagatcagcagatcgagaccatcctggctaacacggtgaaaccccatctctaccaaaaatacaaaaaattagccgggcgtggtagcgggcgcctgtagtcccagctactcgggaggctgaggcaggagaatggcgtgaacccgggaggcggagcttgcagtgagccgagatcgtgccactgcactccagcctgggcgacagagtgagactctgtctcagaaaaaagaaaaaaaaaaaagaaagaaagatcacgacctgcaattgtcacctcatttgggccttacttgggcttgtgacagcccattctacaggtggggaaactgaagctgggaggtcactggagcttgctcccaatcagagccgagtgaatgagcaaaaggggttcagtggaggcagcccggcccccggcctcccactgacatgctgtgtgataagcccagcaattacagcaggaaaagtcacagagtgcagcccagagaactgcccgtgccgtgctctgcgagacacccgtgtcctgtgggaaggtcccgtaagccaaggagagtagaagccacctcagcaagggacatacgaaaggctcatggggcggaagaccccttgggaaggtggcttctgagtatcacggctgtgggctgatttctggaggtccctctccaactcgaccccaaagaaatgacaggggaaaatgcttcccttgtttcatcctactccatccaggcagggccagcgtgtcctgccctccagccagaaggggcgcagtttgttagttcagctcctcctgagacagaaataaagacacgaaccaaaggacatcagcacttacagggctctcaggtcacacacaggatgtccgcgcccactgcagagctgcaggtcccctccagggcagtggggagccacaagcagcgttaggcagcggctgggaccaggaccgcctgagcactcaagaacccccactgccccaagcactgctggcagcaagcccagaaaactgagcccggggagctcctctgagcggcctaagcacccctctaagctgtgctgccccaattcaagcctggctcacggcagcaaagaaaaaatgtgaccttcggagctcccaaaggggccacccataagctgagagcctgcccggaagcacttatagacccgcgtggcttgttttcattgcaaagaacaataaaaattatcttgcctctgatcaccactgatagcccaagaagcaaaaattcgatcccggagatgagaaatgaaatgaaacatcgcgagaaacttccaggaatcttctggatgtggctagactctttagcttgagcttccagacaggccgaggcttggtgctggagcctggccctccgctgacctctcttctacccgggggcacagcccggattgcagagaggctggcgcaagagtgagggagcgagggctagcctgtgatgggctttctccacctagcaccaccctatgctgtggctcaggggagtcaagagtttacacagctgcagagatggattccaggccacttactcaagtctacctactccttccttcggccaatcagctgggtgcctctgcggcctgtgacaccaccagcaaacagctccagacctcctagcatggtctctgtcaaggctgggtggcagatctgtgatctcctttttaaatttttcattttttttaagagatggggtcttgctatattgcccaggctggtctcaaactcctgggctccagcgatcctgccacctcggtctagcaaatagctgggatgagaggggtgcaagccaccgtgcccagctccaaagctctgtgatgtctgtgtctgagctggtgctttggtggcgagcgggggcgggggagtagttggagatgggggaagtatttggacgcctagaaggaactgtagattcagtgctgactgcagttctgagttcaggccgaccacaaggtgataaggcagaaagaaaggtgggagcccctggctggcgtggggcaaggggcgtatgggggtggtgaggacagggtcctacccatgcgctggatggggaaatgcctcaaggtggactttgggcagccggcccaggccaggcaagtgcccctgcaagtgggggctgccggggaaacagcatgccaccctctgtcctacccaaactgcccccagcactgcctgggcctttagctttgatgagcaacctttacagagtcacccagcagcctgtgcccaggtgggacattaagtgtgtgcagataagggaagggacacagatccccttcagtaactgacccctaaggcatgtgcccaccagacgctgggaccacccggttttagagcccatggctgggccaatcatagcccttcacaccgtccccgtcttccccggtccattcttcaattcccttcccagctgagcatgctccattgaagcaaacaagcctaagagtattagaaaattgaatactgagaaaggttcgcagggtcgaggaattcctaccgccttttcatctcgtgccaggccctgagacatggagtttactgactgccccggggggtgcgtgtctaaccacattccatccacacctgattttagggcacttc[210 bp omitted]gaggcagaagaatcgcttgaacccgggagatggaggttgcagggagccaagatcgtgccactgcactccagcctgggtaacagagcaagactccgtcttaaataaataaataaataaataaataaataaataaataaataaaaatggactcagtgaggttgaatggcctgtccaatgtcacccagagaggaaggggagtggagccccagtctcttggagcccaaaacccacatccttacactgagatcagcagttcttacccaggagtgattctgcccccagcaaacacttggtgacatctggagacatctgtggttgtctcaactgaggggagctcctggcatgaagtgggtggaggccagggacgctgctcagcaccgtgaagtgcctgggatggccccaccccagagaacattccagccccagcgtccacagtgccgagggggagaccccgcactacgccacactgcctcctcgcttgaaataaccagaacagtcttggggacgtgctggggaagccaggggagagggaaagaaggggccttccagatcttagactgttggggaattccagaagctgggccacatcctcacggatcagggcctccgaggccaacctcaccttctccaacttccggtgttctccttgtccaggcgcagtttcttaaccttccgcattaaccgctcagctgacctcaggagggcaggggtgcctgcgggcaagtgggaggagagatcaaagggctgcaaccccagcaggtggggagtgggcgctcctgcccccttcgccccctcctcattgctccaggcagccccccaagcctccggggagcaccctgaagccaagggcattctgaagagacgatgcttcaggccctggcctgaaatgcaggaggttctgggcatttgccagagcccgtcatctttctcaacaggaggttcctttcaaggtgtaaagtccctgggagtttcaagtgactccagggacatcacaccagggcacctgctggaaatagaagaatcccaaattcctcactgtggccgttgcctgatggccctggtgaccttgcctacttgcttcacccttgaccatgaccttcggccacacttgcctccttcttgtccctcaacacacctgctcgctcctagcacacagcttctgcacgacgcaccccgtggcctgaaatgccagttcctgcttttgatatgacttgctctttcttgccctgtggctcctgataccacctcttcagaggtctttcctgagcaccccatctgaagatgctacctggcgacccccatcaccacacccagacgctgatacaatggcctggaccataattccagttgtccccttccccagggagagtggttctcaactgggggcgatttggcccctcaggggacactggacaatgtctggagacatgtgtggctgtcacaactcgggggtgaccctggcatggagtgggtggagcccagagatgctgcttagcaccccacagtgcccaggataacccacctcagagaaggatcccacctcaaatgtcagcaatgccaagccggagacccctgcatccattacttggggagaaacttgagttcaacgcctacgctcatattaatactggaataaacttcccatggaacaagcattctaaacgagggggacccccagctcctgggattcacctcctttctccctccccactcagggtgaggatttcaatgtgtgcagcctcctgggaccttagtagggcagaggatcatgggacgcagtctcttggggatccatggaatcccctaacccaggggtctcacctggggataaccggcccccccaggggacatttttggttatgacgactgggacggtgaggggaggcatgtggccagtggaggccagcgatgctgctcaaccccttacagtggacagaacagcccccctcccactcctctgccaagaatgacccaaccctaaatatcagtggcaaagctgagaaaccctgctgtgggtaagggggcactcctcacgggaatatcagttccacagggcaggccacatctatcctggtcccaacagattgcctgagcccagaccatgcctggtcctcaacaaacatttcaggttgaatgaatgagctactgtgctttcttggatgccgtctaaagtcaaaggggccccttgtttggttggtgcccaactaccttctcagacaagccaggtcccatgatgcgcagttgcccaaaggcttaaagaagagagggccagctgggtacagtggctcacgcctttaatcccagcactttggggggctgaggcgggcagatcacctgaggtctggagttcgagaccagcctggccaacatggtgaaactccagctctactaaaaatacaaaaattagccagctgtggtggtgcaagcctgtaatcccagctactcaggaggctgagacagaagaattgcttgaactcagaaggcggaggttgcagtgagctaagattgtgccattgcactccaggggtgacagagcgaggttctgtctcaaaaacaaaagaagagagggaagcacatggggacaggactgagattttaagggaagaggttaagcataaagtcaccacgaaaaatcactggccatactctcagtccagtggtgaaaagcgtgggctctggtctcagagagaaaggttcaaatcctgactctgccacttctggggaagtcgctgaacctctctgagcttccacttccccagcgagaacatggtatgacagtatctacgcctggggccaccaagggaattgaatgagactgcacacatacagcttttaacacagtgtctgatgtagcacaaactaaatgacagctagcattgtcaactaaacaagatactcaaaaccacaggaagggggagactcaaactaaagtcctttcagggccagaatccacaccatttactgaccgggtcaggcagtgtaggtggatccaggcacccctccaccaaatcctgctgaaatcagcactctccccttcctctcctcaaagccttcaaaaagctccttccaggggcagctagagggggacaggggtggaaagaaaagcctccagcaggcgcacaaaaaactgcagccactgccctgcggaggacaaccatccagggccatagaaaaccatttcctgcccatgtctatattctagagcaggcaaaggaatcccaccagcccacaccccagccttcctggctgccaaaccccagcacaactgaccttctaaagggtccagagagcctccattccagctgcaggcgtgggacacagacctttataggataaacatgtcatgaatgtggcaggttaatggaagcaccggccagccgttcagcctcccccactcaggagctgcagactgtcaggcccgattctacctggctagattctagctctgccttgaagccctgcagcactgtctgcatgccctggacagaatctgggagagaagccatcccacgggccccgattcccctgggacccagcagaggaatgcagggattggtgcctacggtccacaccccctgggctttagtcccagctcctcgaaagcaggttggttcttgcctgggaggcaagtgacttcctcctggggcccctggggaagaccagggggtgggggccaagggaatagaccacttttgatggctcagaggcagcgtgaacagggaagtgtcagggctggcctaaggctgtgtgggaagaaggtaggcggttggacaggcctgagaagggaggctgagagaagggggctgaaccctgtgggctggacccttggaagacagctatgctaaccactacaccaccaacgcctcggcaggaaaaagagtctctggatacccttaatagagggatcaagtagggttgaggatcaggactggattggggagaccaagcctcggggcgaaggttggaggaagtggtaaaggagtgaggacaggatgcaggtcgagggaggtggcctctgtgcatatacagcatttgcatggggagagggaggagatcgggacctccagagcctgcacgaaaggggagagggtgtcaaggtctgcagctacgaggacgttcttgggtgcggccacctccggaaggggtcagagcctggtggcctgggcagcaacgggatgggtggggaagcccatcagggaaggggagaaactgggaggtggcctggccagcgcaggaatcggggagggaaagaaggtggaggagggcctggggcggagaggaaacgaggcagggggccggagggacccacagacgggtgcatggaggctccggggtgcggggaggccaggcgatggcgagggcagggtcagggccgaggcggggccggtcaatggcgggttcagggtcgcggccggggcgggacgaggcgcgcgggcgctgctcaccgggacgtggggcggcggccggactgggcaggtcgtcccgggtccagcggcgcctcacggtcgcggctccatgcccgggactgcgaccccggaagtggcgggagcgggggacgacagccgcggcggacacaggggacccgccggctcaggcacctttgacccggaagttgagcgacccaggcggcggcctgggattggacaccaccaggcacgtaccaaggcgtccgcggcgcttgggggggagcccgcggcgcggcggcctaaggtgcgtaacgccccatgaacgacatcttccggtgggttagggagagacacccccctgtgacttggtatcactcagtcaaacccatgatcccccactattaaggatatccggagaggatgctacctatcagggcgttggtggtatagtggttagcatagctgccttccaagcagttgacccgggttcgattcccggccaacgcatgcggtaccacttttgcgagtttgaaattttcattttagttttgagacggagtctcgctcggtcccccaggctggagtgcagtggcgtgatctccgctcactgcaaccaccacctcccaggttcaaacgattctcctgcctcagcctcccaagtagctgtgattacaagcgcacgccaccacgcccatctaatttttgtatttttagtagagatggggtggggtggggcggggtggggcggggtgggggggggggggcggttcaccattttggccaggctggtctcgaactctgacttcaggtgatccgccctcttcggcctttcaaagtgctgggattacaggcgtgagccatcaatcacggaaaatttttttaaatcccataaaaatgtctaaaaggcaggaggaaggcggaagagaaagaatgggactagaatcgttctttcggtgaatttcaaatagtattactctccggttaggaaaaacagctgacctgtttccgcccgggatcgaaccggggacctttcgcgtgtgaggcgaatgtgataaccgctacactacggaaaccggtaggcgtcagggttctttaaattctcctatagagataatgttgcagtgatagttgcgttgtcccaccaaagaaacactggctacagtcagctaaagcaatatccgctcttcctgaatatctgttattgtatttgatacagtagagaccgaaagaaggaaaataaggaagacaaaaagaaatccaataaacaccctttccaacacacccacccacccacacacatgtttatcactttatcataaatccaccttccattaaaacaatgcacgtcaaacggcccacaaacccatccggggtcaaatgaagcttttcatctcatagatatcaatctatacttgatatcacattagtttctgcagatattcaccattttgctttagatcaaactacttttttgtgtgttttgttttttgtattttttagagagagtctcgttctgtcgcctaggctcgagtgcagtggtacgatcatccctccctgcagcctccacctcctgggctcaagcgatcctcccacctcagcctcctgggtagcttggaccacaggtgtggaccaccacgcctggctgaattttaaaaaatgcgtttgtagagacggtgccttatagctgggactacaggcgtgtgcaaccactcccagctaacttttgtattttttgtagagactagagggcctgcactatgttgcccaggctgctttccagctcctgacctcaacgtgattcgcccgcctgcagcctcccaaagtactgggattacaggcatgagccaccgcgcccgaccccaactacactgtaaaagagctttctgaaaagaaaaactgtgtgtgtatgtgtttaccttccgatggagttttgctcctgttgcccaggctagaatgtagtagcgcaatctcagctcactacaacctccgcctcccggattcaagcgattctcctgcctcagcctcccaagtagcggggattacaggcacccgccaccacgcctgactatattttgtatttttactaaagatggagtttcgccatattggtcatggctggtctcgaactcctgacctcaagagatccgcccgcctgagtctcccagagtgctgggattacaggcatgtgccaccacgccaggcctctttattttcttaaagagacagtagaagaggtgggaagatgatggcaagaatttagaatcagactgctgtaaaattctgcacaccctcactcctgcggggctgggattagggtgaggagactaaagcattgtaaggcactggcaccaggtgcaaaaattaaggtggtgccaaaaaactcaataatcaagataaataatatttcaatacatctttttttctctctctgttgtcgctggagtacagtggcacaatcttgacttactgcaacctccacctcccaggttcaagctattctcgtgcctcagcctccctagtagctgggattacaaacatgagccactatgccaggctaatttttgtatttttcgtagagatgggattccaccatg[262 bp omitted]actcgagaggctgaggcaggagaatggcgtgaacccgggaggcggagcttgcagtgagccgagatcgcgccactgcactccagactgggcgacagagcgagactccct[140 bp omitted]ggtgaaactccgtctctactaaaaatacaaaaaattagccgggcgtggtagcaggcgcctgtagtcccagctactcgggaggctgaggcaggagaatggcatgaacccgggaggcggagcttgcactgagtggagatcgcgccactgcactccagactgggcgacagtgagactctgtctctaaataaataaataaataaataaataaataaataaataaatttaaacaaataaaaataaaataattactggtaaataactccatcatgaacaaattgtcaaaagtttccattgaggcaagttttcgtagagatttgccaaattctattggagtctaaaatgtgtacctctctgtgcctgtttttatgtgttttgaggggtttttgggtgtttttgagacagggtctcactgtcacccaggctggagtgcggtggtgcaatcacagctcactgcagcctcgacctcctgggatcaagggatcctcccaccgcaagcctcccgtgtagatgggaccacaggtgggtgccactatgcctggctaatttttaaaaaaatttttagtagagatggggtctcgctatctctcccaagctggtctcaaactcctgcgctcgagtaatcctcccgacttgggttcccaaagtgctaggattacaaggctgagccactatccctgtcctgattttatgtattttaatggttatttctctcagaatgctgttgaaaccatattgaaacattaaaagtagatatattaaaactcacaacattaagaatgtattctaggccgggcgaggtggctcacgcctgtaatcccagcattttgggaggccaaggcgggcggatcactgaggtcaggagttcgagaccagcctggccaacatggctaaaacccatctctactaaaaatacaaaattagccgggggtggtggcacacgcctgtaatcctagctactcggaaggctcaggcaggagaacagcttgaatgcaggaggcagagcttgc[132 bp omitted]tataaaaactagctgggtgtggttgtgcgcacctgtagttccagctacttggaaggctgaggtgggaggattgcttgagcccaggaggtcaagactacagtgagccatgatcatgacaagcactccagcctgagtggtagagtgagaccttgtcaaaacacacacacacacacacacacacacacacacaacaacaactcactatgataattgtgcttttctggcttttttttttttttttttttttagacagagacggagtctcgctctgttgcccaggctggagtgcagtggcgccatctcggctcactgcaagctccgcctcccaggttcaagccattctcctgcctc[184 bp omitted]gtggcttttttgtgtgtgtgtatttttttttagatggagtctcactcttgtccccgaggctgcagtgcaatggcacgatctctgctcactacaacctccactacctgggttcaagctattctcctgcctcaacctccagagtagctgggattacaggcacccgccaccacgcccagtaaatttttgtattcttagtagagacagggtttcaccacgttggccaggctggtgtcgaactcctgacctcaggtgatccacccgccttggcctcctaaagtgctgggattacaggcgtgatccactgcgccgagcccatgttccctttttataaggacacccatgatattagactacagcccaccctaatgatctcattttaacttcattgcctttgtgaagaccctatctccaaatagggtcatgttcttagatactcaggggttagaattctgacttacctttccggggagtgggacacaagagagggattagccattgtttgatgaattgcaactaattaaccaatcccctattgtcggtcttctaatgcttccctgttaactaagctgccacgaaatcctggttgctacaatttatcataatgttgcccatttacgtgtctgtttctgcttagagcaaaacccactgaatctaatgagatgtcctcattctccagttccactttctcttctccaattatctttttgttttgttttgagagagtctcgctgtgtcccccaggctggagtgcaatggggtgatcgtggctcactgtaacctccgcctcctgtgtttaatcaattctggtgcctcagcttcccgagtagctgggattccaggcgtgccaccatgcccggctaatttttgtatttttagtagagatgggttttcgccacgttggccaggtggatctcgaattcatgacctcaggtgatccactggccacggcctcccaaagtgctgggattacaggcatgagccactgcacccagcctccaattctactttgagctaaggtgactatacacctggctttggctaggacggtcccggtttatgcccccaccccctcagtgccccctttcttgctcaaaagtgtgttgattgaccaggcgcagcggctcacgcctgtaaccccagcactttgggaggccgaggtgggcggatcacctgaggtctggagctggagacctgcctggccaacatggcgaaaccccatctctataaaaatataaaaattagcctggcgtggtgtgtgcctgtaatcccggctacttaggaggctgaggctggagaatctcttgaacccgggaggcagaagttgcagtgagccgagatcgcgccattgcactccagcctgggtggcagggcgagactccatctcaaaaaaaaaaaagggtcctgattttgactataaattatagggtcgctctgtcttgagcttcaacacagactcccgcatccaccactccccagaaactcttctcactgatgaccctcctgcatccggttccaaggtcagtctctccgtcccagtcctctccatggcatctgacccgccggatccctcctgctccggggagctctgtcctcagaccatgcacttccctccaacctgtctgggacatccttcagtcttcccttctctccattgctggccaagggctgagtcctccagcctcctccctcctccacccacacccctccccagcgggctccaaaccccgtctacagccagcatcgcctacagtctcatctccagcctgagtctcccttgaagtccagactctgttcagcagcccctgatgtctccacatggggggctcatggggtctcacattcaacgcagtcacattgggccccactggacccccaaaccattcctcccatgtccaccacctaggctgagggcaggtccgtccttccagggactcaaccagaacctgggagtcaccctgggcctctactctcccacccatatccaatcactcagtaaatttgattaacactgctttcaaaatgcacctagataggccgggcgcggtggctcacgcctgtaatcccagcactgtgggaggcccaggcgggcagatcacctgaggtcaggagttcgagaccagcctgacctacatggagaaaccctgtctctactaaaaatacatagctggccgtggtggcatgtgcctgtaatcccagctactcgggaggccgacacaggagaactgattgaaccgaggaggcagaggttgcggtgagccaagatcacgccattgcactccagactgggcaacaagagtgaaactccttctcaaaaaaacaaaaatgcacctagaatctaatcactgctttcccactcagtgcctgttccctggtccagcctccagcacagctcacctgagccaacacacagtcacccctacctggaccccagttcctgccctcaccccccacaggctgtctccccaccagcagccaccagagggtgcttttgagcacctgagtcacttcctatccctcctctgctcacaaccctccatggctcccacctctctcagggtcaaagcccaaggcctccccatgtctcaccaggtctggcatgacctgccccatcccctccctgccctctcctcttccctttctccccattgctcactctgctcctcctcactgttcctccaacacaccaggtgaagtcctgccgcagggcctttgcacaggctgtgccctctggtggacccaggtatttccaaggctcactccctctcttccttcaaaccttggttccaaggttacctcctcagagggcctttcctgcctgagcctggctaagtggtagccagtcctacctggccttggaactcacaaacttggtacctatcatttatacatgtccttccagggcggcgcagtggctcacgcctgcagtcccagtactttgggaggctgagggtggcagatagcttgaggcctggagttcaagaccagcctaaccaacacactgaaaccctgcctctacaaaaaaaaaaaaaaatacaaaaattggccaggcatggtggtgcatgcctgtaatcccagctacttgggaggctgaggcaggagaatctcttgaacctgggagggggaggtttcagtgagctgagatcatgccactgcactccggcctgggtgacagagcaagactctctctcaaaaaaataaaaataaagatgtcctcccaatggctttttagtctctgaaataatcacatttgtagatctgtttgctaattttgcctccatttccctagccaggctatgagcttcactagcagtattttttgttatttattttagtccattttgtttcctattgtgtcactaagtctcagtaaacatttgttgaaattatgaacaaatgcacagccggccaaaggagagaaaaggcctggggtttggagatggtagtgaagtaatacaggtggacttcctggtggagggggcgaacctgggagaacatgttacctcccccagaagccccatcaaggcctgagaactcattaatctgccaaaacccaaccaaccaaacaaacaaaccaaacactcctttaaaactttttcttggggccgggcgcggtggctcatgcctgtaatcccagcactttgggaagccaaggtgggcggatcacttgaggtgaggaatttgaaacccacctggccaacgtggtaaaaccccctcctctaccaaaaatacgccaattagtcagtcgtggtggcgcgcgccggtaatcccagctacttgggaagctgaggcaggagaatcgcttgaaccagggaggcggaggttgcagtgagccgagatcgcgccattgcacgccagcctgggccacagcgtgagactctgcctcaaaataaaataaatcagccgggcgcggtggctcaggcctgtaatcccagcactttgggtggcc[134 bp omitted]aggc[138 bp omitted]tccttgaagctctctcagggcagccaacatgctgtgcgactcctggcaagttacaccattcagtgcctatttgcctgcctgaagtcaggtagatgtttcagaggtggctacttcacagaggcggcttgtttaaaaggaacaatagttccctctttccactaggtgtcagcagaagcacagctggcctcactcggcatctctccacccctacccccgtaaccacccccgtcccatcctctccatctccactccgggccccagacctcagcatctcaaattcagacacttccctccctcagtagacacccttgtatttgcagacaaattcctgtccccaggcaggccttcgcagcaggcatggttggtggcctgtcctacctggtgtccgatcacaccaggaaacttcagcaagggctgcagagaagaggaaagagcaataaaagaaggaaggtacctagggcctgggtgcggtggctcatgcctgtaatcctagcactttgggaggctgaggcgggtggatcgcttgaagtcaggagttcaagaccagcctggctaacatggcgaaaccccgtatctattaaattacaaaatcagctgggtgtgattgttcacgcctgtaatcccagctacttgggaggctgaggcaggagaatcacttgaacctgggaggccgaggttacagtgagccgagatcgtgccactgcactccagcctgggcgacgagagcgagactccatctcaaaaaagaaggaaagtacatagggattcaatgtttccagccaggaaacatttcatacaaatgtttgtgttcaagaataactttgcatggaatagcggaaatctgtattgaaaattgttctaagaaaatgtcactttttgcctaggtacagtggcttacacctgtattctcagtactttgggaggctgagatgggaggatcacttgagcccaggagttcaagaccagtctggataacatagtgagacccccgtcttagcaaaaacaaaacaaaacaaaacaagacaaaacaaaaaaaaccttagctgggcatggtggtgagtgtctatagtccccactacacaggaggctgaggtgggaggattgattgagcctggaagtttgaggctgaaaatgagctataattgaatcactgcatcccagcctgggcaacagagttagatcccacagaaggaaagaaagagagagggagagagaaagagagagaaaggaaaagaaagagagagagaaagagaaagaaagaaagagagagaaagggaaagagagaaagagaaagaaagagagagaaagggaaagaaagagaaaaggaaagaaagagagagaaagggaaagaaagagagaaagggaaagagaaagaaagagaaagggagagagagagaaagagaaagaaagaaaggaagaaagaaaagaaagaaagaaagagagagagaaagaaagaaaagaaaagaaaagaatggttacactttaaactcatttagttcccccaacaaccccattatgcaggtgctatccagaatcatcattgcccttttaatgggtgagaagacagagggacagggaggttaatttaacctgctcagggagcgacagagaggttaagtaactcaaccaaggtcacccagatcatgagtagcagtattgggattcaaagccaggtggtcaggctccaaagtccatggtgcatgatgagactgcattcaacacagatgaatttcaaggtaatcaaagtaattaaaaataaaataagatataataaaagaccattgaattgaaccagccagtagaagaaccagcctggaccttaaaagggtcatggggccaggcacagtggctcacacgtgtaatcctagtactttgggaggctgaggagggaagatcgcttgaggccaggagtttaagaccagcctgggcaacagggtaagaccctgtcactaccaaaaatacaaaaattagcccgtcatcgtggcatgtacctgtagttccagttactcaggaggctgaggtggaaggaccgcttaagtccaggaggctgaggctgcagtgagctatgattgcaccactactgcactccagcctgggtggcagagtgagaccctgtctcaaaaaaataaagtggggggctgggtgccggtcatggtggctcacacctgtaatcccagcactttgggaggctgaggcaggcagatcacctaaggccaggagttcaagaccagcctggtcaacatggtgaaaccccatatctactaaaaatacaaaaattagctggacgtggtagcacacgcctgtagtcccagctactcaggaggctgaggtaggagaatagcttgaacctgggaggtggaggttgcagtgagccaagatcacaccactgcactccagcctgggtgacagagcgaaaccctgtctcaaaaaaaaaaaaaaaaaggaacaaagagagaaagaaacagagagagaaagagaatgaaagggaggagagagggagtgagagaaatagagagaaagacagcgattccagaaaccatctcactcacttctcgccctccctggcctcttcaacagtagtatttcaactgagtgg[132 bp omitted]accaacatggagaaatcccatctctactaaaaatacaaaattagccaggcctggtgacacatgcatgtaatccccgctgctccggaggctgaggcaggagaatcgcttgaacccgggaggcagaggttgcggtgagccgagattgcagcattgcactccagcctgggcgacaagagtgaaactctgtctcagaaaaaaaaaaaaaaattaaatatttattccctcagcatcatatctacaataatcccatttattctcaatgccacagtggcaattcttcgatggatcggccagggagatttgaagtacccgggaagccctcattgtactacatctttgtaattttcattgatttatgaaacgatgcctgttgtctgcagcccctgctaacacggtcctctaagattactgccatttgggggtgtttaaatctatcatacatggtactataataactacaaccttaacagcaga[187 bp omitted]tggtggtgggcacctgtagtcccagctactcgggaggctgaggcaggagaatggtgtgaacccgggaggtggagcttgcagtgagccgagatggtgccactgcactcccgcccgggcaacagagtgagactccatctcaaaaaaaaaaagaaaaaagaatttaatcctcggcaaccaccctatgaggtgtgattaatattattgtttgtttgtttgggtttttttttttttctttttctttttatacacagggtcttgctctgtcgcccagaatggagtgcagtggtgtgatcgtggctcacagtagcctggaactcctgggctcaagtgatcttcatgcttcaatctcctgagtagctgggagcagagacacatgccccaatcactgaaatttgccccaaatcactcatataggggcagggtcaaaacacaaacctgtttctctatgagggctgtgtcctgtgtccacattatcacttaatatcagtgagtttcacctgggggtgattctgtccccccacaggggacacttggccatgtctggggacatttgtggtgggtgcccctggcatggagtgtgtggagtccagggatgctgctcagcatcctgcactgtccagggcagcccccaccccacaggatggcccaggcctaaatgtccacactgccaagggggagagagcctggcctggccctcagctcccctccagcggcccctagcccctatgacccaccatgggtggtgaggcttccctgtgttgctggccttgcaggctgcacccctgtggttggtttcccttagctctccccacattcctataggtggaactcctttctggtacccagtctggaacagaccagcctcgttccgccgtccccctttgggaggccaaggcaggaggatcctttgagcccaagaggttgtggctgcagtgagctgtgtttgtgccactgtactccaccctgggcaacagagcaaga[142 bp omitted]tgaaaccctgtctctactaaaaatacaaaatttagccaggcgtggtgtcacacgcctgtagtcccagctacttgcgaggctgagacaggagaatggcttgaacctgggaagcagaggttgcagtgagccgagattgctccattgcaatccagcctgggcaacaaagcaagactccatctcaaaaaaaaaaaaaaaaaaaaatatatatatatatatatatatatatatatacacacacacatatacatatatatatacatatatatacacatatacatatatatacatatatacacatatacatatatatacacatatatatatacacacatacatatatacacacacatatatatatatatatatatacacacacaccatcggctaggcatggtggcttacacttatagctccagcactttgggaggccaaggcaggaggatgtctagagcccaggagttaagatcagcctggcatcacagtgagaccaatctctacaaaaaattcactggcatagtggcgttcgcttgcggtcccagctacttgggaggctgaggcgggaggatggcttgagcccaggagtatgagaccagcctgggcaacatagcaaggcccggtgctctacaaataataaaaaaatgagacaggcatggtggcacacacctgtggtcctagccacttgggaggctgaggcaggacgatcacttgatcccaggaggttgaggctgcagtgagctttgatcgcaccactgcactccagcctgggaacagagcaagaccctgtccctaaaaaaaaaaaaaagaaaataaaaaaaaaaagagagagacagagagagaatgacagggaggggatagccaaggaaggggtgaggccagaggtgtctccagttaaaacaggggcagtagtctgatttgcagatgccaccatggtgcagctgggcatgcaatcccctggcagggttcaatgctatgcccatttcctagaaggcaaaactgatactctgagggcagagctgttctattctttccttccttcccctagctggggggaagggagggctccccagaggagaggagagctgggtggcaggggtgggggtgggagagatagctgattaggggcccgtttattagctgtaattgctgtctcctgggctgaattagacgaaattacagccgctggcccttcaggatgtcgagctctcggcattgtctgtggaagcaatccaacggcggaggggagtggagagggggatggggggtgcctcttgacaatagagcccccgaattagccaggcagggaggcggggaagctgcggcctgaccaccccctccccaccaccctaaagagctgtcagagtctcaatgaattcagctccacgaaggccaattaaagatagcagggggcccagtgggctgggacaggaggtgggagaagaggggggagggggaccacatgaaccagggtagggaggtgccagcgaggggtgcccaggtccacagagatctgtgtggagagacaggctgtgggggcatcgtggaccccccaaatattgaagggggtggggttctattcttcctcctcacactaccctttgccccccatgcctgattagaaagatggggttgccctggaagagcaagaggagccccccaggagaagaagagacagtgggacccacccagcaagcactcctcctacctctcccgtggcccttggctggtgttccttggtcaacaagcatcagctgttctgtccctctgttagccactgctcacggggccacttccagtagcatcctgagggaaggccagccacacctcttggaagccctccaggattgcctaaggcctcaccacagagagtctccaatccccaggcaccctcccttccccatctcctctctaatctaacccccgctccccgtcttccaaggaactccccctcctctgtgagccccacctctagacctcctccctttcttgttctttcttttttgagatggagtcccactctgtctccaggctggtgtgcagtggtgtggtcttggctcactgtgacctccacctcctgggttcaagcgattctcctgcctcagcctcccgagtagctgggattacaggcgcccgccagcacgcctggctaattttttctatttttagtaaagacggggtttcaccgtgttagccaggatggtctcgatctcccgacctcacgatctgcccgctgcagcctcctaaagtgctgggattacaggtgtgagccactgcgcccggccagtctctactaaaagtttaaaaattatctgggcatgctgggcacggtggctcatgcatgtaatcccagcactttgggaggccgaggcaggcggatcacttgaggtcaggagttcgagaccaagctagccatcatggtgaaaccccatttctactacaaatacaaaaattagccgggcgtggtggcatgcacctgcaatcccagctactcgggaggctgaggcacgaaaatcgcttgaaactgggagggggaggttgcagtgagccgatattgtgccactgcactccagcctgggcgacagagtgagacttcctcacaaacaaacaaacaaacaaataaaacctctggaccccaaagcttggtggagcttcctgattggtgaacatattgatgttcttccaggagaggagacacactctaatgcctcaagaagaggacatggggccgggcacggtggctcacacctataatcccagcacactgggaggctgaggtgggaggatcacttgagctcaggtgttcgagaccagcctggccaacatggtgaaaccccatctctactaaaaatacaaaaattagctgggtgtggtggcgggcaactgtagtccaagctctggcggctgaggcaggagaatcacttgaacctgtgaggtggaacgctgtgagtcaaaatcacaccactgcactccagcctgggcaacagagagagactccacctcaaaaaaaaaaaaaaaagacatggaagctcttttggggaccctcccagactttgtcctatgtgtctctttgtttggctgtttctgacttgttttgttactttttaaatgtttttttagagacatgatctcacttcgttgcccaggctggagtgaagtggtgagatcataactcactgtagtcttgacctcctggcctcaagagatcctcctgcctcacactcctgaggagctgggactacaggtgcatgctatcatcgctggctaatttttttttttaattttttgcagagatggggtctcactatgttgcccagggtggtcttgaactcctgagctcaaggtatcttcactcctcagcctcccaaagcgctaggattgcaggcgtgagccactgtgactggcctctgacttgtggggttttttgcttatttgttttttgtttttgagacggagtctcactctgtcacccaggctagagtgcagtggcgcgatctcggctcactgcaacctccgcctcccaggttcaagcgattctcctgcctcagcctcctgagtagctgggactacaggcgcccaccactatgcttggctaattttttgtatttttagtagagacggg[147 bp omitted]gtctcactctgttgcccaagctgcagtgtagtgatgcaatcatggctcactgcagcctcaacctcccaggatcaagtgatcctcctgcctcaacctcccaactacctgggactacaggtgcacagcaccacacacagctaatttttgttttttttttttagaggtggagttttgctacgttgcccaggctggtctcaaattcctgggttcagtcctcctgcctcggcctcccaaagtcctgggattacaggcatgagccattgctcctggtgacgaggacagccttgttagggactgtgcccataacttgagtctgttataaccccaggcggttaatgtcagaattgcattgtagagcctgggtaatgtggcaaaatcctgtctttacaaaacatcaaaaaattggcccggcacagtggctcatgcctgcaataccaacactt[134 bp omitted]gaggcagaagaatcgcttgaacctgggaggtggaggttgcagtgagccaagaccatgccattgcactccagcttgggcgacagagtgagactctgtcttaaaaataaataaataagtaaataaaattaaaaaggaaaagaaaataatgtattttatttattattattattattattattatttttattcttcttattatttttttggagatagaatctcactctataccccaggctggagtgcagtggcatgatctcagctcactgcaacctccagctcccgggttcaagtgattctactgcctcagcctccagagtagctgcgattacagacgcccaccaccatgcctggctaatttttgtattgttagtagagatggggttttgccatgttggccaggctggtcaagaatatattccatttattttatattatatatagtacatatgtagagtattagctagagtattctataatgtatagtaatatgtatctattgtctatcatataaatcacatatactcacaccaagagtgtatcttttattttttatttttgtgatgggtcttgctctgttgcccaggctggagtgcagtggcgcaatcatagctcactgcaaccttgaactcctgggctcaagcaatttgcctgccttggcctcccaaagggctaggatgacaggcgtgagccaccacgcccggcctctgagtgcctctgtgttgtgtgtgaagcccagtttgctggaatgttctggtgttacaactgttccagcctgaccgtgtgtggcagtgggagtgtatgtcatgatctgcgcttctgtgactgtgtttcgtggctacatttgtgtgtgtgtgtgggcatgttcgtgggcatgtggaggtacgttcgtgtcccctgtgtggttgtacttgtaaccctgcgtgtgtgtctgtgtgtgtgtgaacccgtgaccatctgaaagtgcacggccgagcttgtggctggggtgtgtcgggcctctgtgctccgaatcctgtcccgaggctgttgcacgtggccttgggcgtcctccagagagacagtcatgctccacggccacgtgcgtgcgtgtgtgtgtgtgtgtgtgtgtgtgtgtgtgtgtggctctggcacatgcctgtgtgaccctgcagggctgtgtccaggggacctagggggacaggagagagctcaggggctgtctgagccgtagggggtgtctgtgattttcagtgtgtgtggccctgtggtgactctgagtggcaggtacatgtgcatttagaagaagcccctggggcccagcctcccccagcccccagccagcctggtgcatgttctcaggacacacccaggcctgaagagctcataagtggagatgagtccccaccagccttgcagtcctccgttccctctcctcctctcctttcctccccctttctcccctcctctcccccttggtcccctctccctgccgagtacaaggggagaagcagcctctgccatcagctggaacacgcttaagtggcccatttcctgggaggctgggtggcctcaccagccattagggtaatgagccgcatgctgtcccccatccagcgccctggtaaccaaggaggggggcattgctcgctctgcagggctgcgttttcctcctcctggcagggatagggatggggagcagggagggagggccctgcagacacagaccaaggccagaggggagggacacagcagagattcacatacaggtcggttggaggcaggaagggaacaagagacagagaggagagggagagacagagccagagatagactgagagcgaaaatggggtggagacagagatagagagagactaacgaccaggcaaggaggaggaagacagggaaatgagagagaagatgtttggggggtgggagagagaaacaggcagagagacagacaggaaaagaaccagacaggtgcagactcacagatcaccagggagatggccagggacaaccgaggcaggaagagagacagggaggcagcaggggcaggcaggagggagagagagaaagaaagagagagcgaatccaaaaaagagacagagacaaaaaagggacagagagagagataaaaaagagacagaggtatggtgacttatgtctggaatcccagcactttgggaggccaaggtgggtggaccatttgagcctatgagcttgagaccagcctgggcaacatagggagaccctgtctctaccaaaaattttaaaaagtagtcaggccgggcacggtggctcacacctgtaatcccagcacttcggaggccgaggtgggcagatcacctgaggtcaggcattcaagaccagcctgcggccaagtgcggtggctcatgcctataatctgagcactttgggaggctgaggcaggtggatcacggggtcaagagattgagaccatcctggccaacatggttaaaccccgtctctcctaaaaatacaaaaaaattagctgggcatggtggcacgcgcctgtagtcccagctactcaggaggctgaggcaggagaattgcttgaacccgggaggcagaggttgtagtgagccaagatcgcgccactgcactccagcctgacgacacagcgagactctgcctaaaaaaaaaaaaaaaaaaaaaaaaggccgggagtggtggctcatgcctgtaaccccagcactttgggaggccgaggcgggcacatcatgaggtcaggagatcgagactatcctggctaacaaggtgaaaccccgtctctactaaaaaatacaaaaaatgagccgggcgtggtggcgggcacctgtagtcccagctactcgggaggctgaggcaggagaatggcgtgaacccgggaggcggagcttgcagtgagctgagactgcaccaaggcactctagcctgggtgacagagtgagactccatctcaaaaaacaaacaaacaaacaaacaaacaaaaaaaccagcctggccaacatggtgaaaccccatctctactaaaaatacaaaaatcagctgggcatggtggcaggtgcctgtaatcccagctaaggaggtcaggagtttgggaccagcctggccaacatggtgaaaccccatttctactaaaaatacaaaaattaggccgggcacgggaggctaagacaggagaatcgcttgaacccgggaggtggaggttgcagtgagccaagaaggtgccactgcactccagcctgggcaacaaaagcaagtctgtctgaaagagaaaaaaaaaagagtcaaggtccatgttacagtcagcctggtatatttatacatcagcacagcaaagccacactgtgacccacatatttggacacaaatgccatcctccttacaggggagtacaacattgcacccctccttttctctccaacccttctcatagcttggtcttcccaggcccagtgacatctcaaggctctgtctctcgacgatctcgcagatgactcattttttgttcctgttctagcagcaatcctgcacacagagtaatagccttccattccctcccacgcctgtccctcctctctgccctcactccagcctcctgatttcatttttctttggatatattcccagaagtgagattgccagatcatatggtaattctagttttaacttcttgagggagaaacctccttaccatttcccataatggctatcacaatttccattttcaccaacagagcaaaagggttcccttttctccacatcctcaccaatgcttgtgatgtcttgtctttttgataacaccactctaacgggtataacgtggtgtgtccttgagactttttctttttttttttgagatggagtctcactctgtcacgcaggctggagtgccgtggcgcaatctcggctcactgcaacctccacctcctgggttcaagcgattgtcctgcctcagcctccccagtagctgggactataggtgggagccaccacacccagctaatttttgtatttttagtagagatagggtttcaccatcttggccaggctggtcttgaactcctgacctcgcgatccacctgcctcggcctttcaaagtgctgggattacaggcgtgagacaccgcacctggcctaatttttgtatttttagtagaaatggggtttcaccatgttggccagtctggtcccgaactcctgacctcaagtgatctgccgcctgcctcagcctcccaaagctctgagattacaagtgtgagccactgcgcctgccccacccccctttttttgagacagagtctcactctgacactcaggctggagtacaatggcatgatcttcgctcattgcaacgtcgaactcccaggctcaggtgatcctccccactcagcgtcccaggttgctgggactgtaggcacgtgccaccatgcctagctactttttttttggtttggtttctttttttttttttttgtagagatgaggttttgccatgttgcccaggctggtctcaaactcctgggctcaagcaatcctcctccctcagcccctcaaagtgccaggattacaggcatgagccactgcgtcctgccagatgaccacccctttgaagtaatttgtttctaaaaatggctgcaattgtttccatcctcttattttttttttttttttttgagacagagtgtcgctgtgtcacccaggctggagtgcagtggcatgatatcgggtcacagcaacctccgcctcgcagggtcaagcgattctcctgccttagactcccaagtagctgggacaataggcgcctgccactacacctggctaatttttgtatttttagcagccttaaagcctggacaggcttggatggcttcaaccaacacgatattgtggaagtggtgctgtgggatttcccaggctagatcggaaaagatcagcagcttcttgtttactggacactggttttcagagctcagaggcagccgggcgtggtggctcacgcctgtaatcctaacactttgggaggccgaggcgggtggatcatgaggtcaggagttcaagaccagcctggccaagatggtgaaaccctgtctctactaaaaatacaaaaattagctgggcacggtggctcacgcctgtaatcgtagcactttgggaggccaaggcgggtggattgtctgagctcaggagttcgagaccagcctgggcaacatagtgaaaccccatctctactaaaatacaaaaaattagccgggtatggtggcatgcacctgtagtcccagctacttgggagcctgaggcaggagaattgcttgaacctgggaggcagaggttgcagtgagccgagatcgtgccactgcactccagcctgggggatagagcgagactccatctcaaaaacaaaacaaaacaaaaattagctcagcatggtggtggcgcctgtaatcccagctacttgggaggctgaggcagagaattgattgaacctgggaggtggaagttgcagtgagctgagatggtgccaccgcactccagcctggacgacagagcaagactccatctcaaaataacaacaacaaaaaacaaacaaaaacaaaacaaaacaaaaaaacacagagttcagaggctcaggcctcctcagaccctttcccccacagcgtctccacctcctggttgggcctgactgctgtttctcctctccttgtcctcatgtctctgtctctggtggggttttggactcttgtttctttccgaggtggatttctgtggttctcttggtgccttctgtctgggggtcaggatcaagctctctctgggtctctccctgtctctgctctgtgtttctctgtgtctctgtttctgtttgctttggggtcttttgctctgtgtctctgatgctctctgtctctgtctctctctgtttctttgttgttgttgttatttagagatggagtctcgctgtgtcactcaggctggagtgcagtggcgtggtctcggctcactgcaacctctgcctcccaggttcaagtgattgtcctgccccagcttcctgtagctatgattataggcgtacaccaccacaaccagctaatttttgtgtttttagttgagatggggtttcatcgtgttggccaggctgttcttgaactcctggccttaagtgatcctcccgcctcagcctttcaaagtgctgggactacaggagtgagccactactcctggcctggggtgtcttactctgtgtctctaactgtctgtctctgtctctccctgtatcttcgtatctctgtttgcatctctctctctagatctctccatctctgtccctgtctctctccatctctctgtctctctgcatctctatgtctctgtctccatctctctacatttttctcttaatctctgtctctgtctatctctgtttctgtctttctgtgtgtttagtcttgcctctgtctctctgtgttttcatttctctttttctctctatctctctgtgggtgtctctctgtgtctctccctgtatctctaactgtctgtatgttcagtcttgcctctgcctgccctctgccccacctggctctctctctctctgcatctctgagcatctgtctccctccccacctccacaccccttcaaattctcgacccccgggctttgaggaggacccccgacagtggcagatattcagacaaccagacacccttgagctactctgcccctaactccccagactgccccaggagattcgatgccactgacttttttgctgcacctcgattaaatttcctctcctccaccggtgaagcccacacctttcctaatgcagcctgaatcctgggctgcactccacattcccagcctactcccgggtcaccagatgcccgcctgcacaatgcacccctgcacctgcctgggttgcccacctgagccccgcccctccccaacacagcgctggggtcgtcatctccacctgggacgcttgggggcatcaacctgagttctcagtgaaagtcttatttaaaaagccttcagtgatttgtctagattcttccgttttctcctgcttgttttgagaacacacacacacacaccatgtgtgaaattcgtatttctttttctcatctccagactttttaaaaactttctattttaaaaataatgataggctgtacaggaagttgcaaaaatagcacagccagcccctgtacccttcaccccgcttccccctggaatagcgtcttacataactcaaataattctcaaagccggaagcggctgtgggcgccacacctgctccctcgttggcagagctccatttccagatttttcacattaagcttccctcttgcacacacccctgagtatgtgtacgtacacttctggagtcacacactgcacctgacccacactcacagagtcacatgcctacatccaagcacacgagttgctcacacacagtgacgtgcaccacatatgtacaggcagattcaaatacctacagaggccaggtacagtagctcatgcctgtaatcccagcatttggggaggccaaggtgggaggatcacttgagccaggagtttgaaaccagcctggacaacatggaaagaccccatctctttaaaaaaaaaaaaagaaagaaagaaagaaaagaaaaagaaagcaggtagagtgatggggctcacgcctataatctcagcactttgggaggctgaggtgggtggatcactggaggtcaggagttcgagaccagcctggataacatagtgagactccgtgtctacaaaaaataaagagttagctgggcgtggtgatgcgcacctatagtcctagctactcaggaggctgaggcgagaggatctcttaagcccgggaggttgaggctgcagtgagccgtgatcacgccactgcatccaacctgggtgatagagcgagaccctgtcttaaaaaaaaaaaaaaaaggtagagtgtggtgcttcacacctgtaatcctagcactttgggaggctgaggtgggtggatcactggaggccagaagtttgagaacagcctggccaacatagagaaaccctgtctttcctaaaaatacaaaaaaattagccaggcatggtggtgcatgcatgtggtcccagctacttgggaggctgaggcaggaggatcacttgaatccagcaggcagagactacagagagccgagatggcaccgctgcactccagcccgggtgtcagagccagaccctgtctcaaaaaaccccacaaaagccaaaaaacaaaagacaaaaaaaaaaaaagactgtagaaaaggacaggacacggtcacagcacagatacacacacacacgcgaccaattacatggtgcatggaaatgaaccctgttgtgcacacacagctctgaatacctttgttaaagtgcccacacacacatcacatccatgcagagacctacacgtggggttgcaatgcagattcaaacagctacacaaatatgcatgcacacagtcacactcatgcacgcacacacacacacgcgcgcaccaccccacgtccacactcacagtcatacatgcgcgtgcacacacacacacacacacacacacacacacacgctgccttgctggtaccgtaacctgtgctggaaaaatctgcacagagaattatgaatgtcatctgcgtccccgcccccaagccgtactagtcaccatggtttcagtaggatgctgtctgtattaggcagtctctctctctctctctgtctctctctctctctctgtctctctttctctgtttgtgcgtgtgtgaagaaaacagaaaacatttgctgccttggtgtaagtttgtccagctttggatctgacagacatagaatatactcaatgttctggaagggaagattaacgcagctgtagcaaggcctgcagtggtcacccgtacagagccctccccagctgtgtccttcttctagtgtaagagaaataagatgggggaagatgaggctcagcgctggtctcccaggctccaaagctggtgctggggccatgaggccacccggccccctcacccctgtttgtccctctgaagaaccctggacactgagttctttcttgggcccagcctctcac[144 bp omitted]gcctcctgagtagctgggactacaggtgcccaccaccacgcccaactaattttttgtatttctagtagagatggggtttcaccgtgttagccaggatggtctcggtctcctgaccttgtgatccacctgcctcggcctcccaaagtgctgaggttacaggggtgagccactgtgcccggcctgaccctccctttttttttttttttttttttgagacagggtcttgctgtgtcacccaggctggagtgcagtggcacgatcacagctcactgcaacctccgcctcctgccttcaagcaattcttctgcctcagcctccggaatagctgggattacaggagccaccacgcctggctaatttttgtaattttagtagagacagggttttgccatgttggccaggctggtctcaaattcctgatctcaggtgatctacccgctttggcctcccaaagtgttgggattgcaggcgtgaaccactgagtccagactcaacacataatttcacttgtctttttcgtattacatgagtacacattccctgtttaattttttttaattttaattttaattttttttgagacagagtctttctctgtctctgggagccacattgcccagcctcaataagtaggtttaaatttttttttttcattttcagaaacagggtctcactctgtcacccaggctggactgcagtgacatgatcatagcttactgcagcctcagactcctgggctcaagtgatcctcccgcctcagcctcccaaaatgctgtgattaccaggcatgagcccagcaataactatttgttgaatgaaaatgaattagaccgctgggcgaggtggctcacacctgtaatcccagcacgttgggaggccaaggtgggtagatcacctgaggtcaggagtttgagaccaccctggccaacatggtgaaaccctttctctactaaaaatataaaaattagctgggcgtgatggtatgtgtctgtaattccagctactcaggagtctgaggtgggagaattgcttgaacccggaaggcagagactgctgtgagctgagattgtaccactgtactctacctgggccacagaccaagactctgacaaaaaagaaagaaagaaagaaagtaaagaatgaaaagaagaaagaagaaagaaaaaaggaaagaaagaaagaaggaaggaaggaaggaagga[140 bp omitted]tgaagaaaccccatctctactaaaaatacagaatcagccgggcgtgatggcacatgcttgtaatcccagctactcgggaggctgaggcaggagaatcgcttgaacccagcagggggaggttgcagtgagctgagatcgtgccatgcactgcagcctgggccacagagcaagactctgtctcaaaaaaaaaaaaaagaattagaccactggacaaacccaaaccaaaagatcatctacaaaccctgtctcctgacaaacattcccggagagggcacagtctctacccaccttccagttgactacccctggtgcagacaccttgaaccaaactccctctgtttttcagcccacgaattggcatcacaggtgagctgggagactctgtaaggccatgacggacatggggattatcagcatccgtcctgatcaaccaggcctcatttccaggccccacacctgctcagggccggcagcagctgagcagagctgaaacttgagcccctatactcacagcttgcgacagacgcacccagacctgtgcagacacagctgatgaaccagaaacagtccctgggaagccccagcagccccagaggctggcggcatgtctggccacaatttgggaaatattacacttgtgggaccagagaccttga[132 bp omitted]gaaaccccatctctactaaaaatacaaaaactagtctggcatggtggcatgtgcctacttgggaggctgaggcaggagaatcgtttaaactcaggaggcagaggtttcagtgagctgtgatcccgccactgcactccggcctgggtgacagagtgagactttgtctcaaaaagaaaaaagaaagggccgggtgcggtggctcatgcctggaatcccagcactttgggaggccgaggtgggcggatcatgaggtcaggagatcgagaccatcctggctgacacggtgaaaccccatctctactaaaaatacaaaaaattagccaggcgtggtggcgggcgcctgtagtcccagctactggggaggctgaggca[137 bp omitted]tggtcccagcactttgggtggctgaggcaggtggatcacctgaggtcaggagttcaagatgcaggggaggtaagtccccaaattgggtcttagcaggggagggttttttactttgcccaggagagaattcagggcaagctggtggtgttagcaaccttttttttttaaaacggattctcattctgtcgcccaggcaggagtgcagtggcgtgatctcagctcacagcaacctccacttcccgggttcaagcaattctcctgcctcagcctgctgagtagctgggactacaggcgtgcgccactgcgcccggctaatttttttttgaaatggagttttgctcttgttgcccaggctggagtgcaatggttcgatcccggctcacagtaacctccacctcccgggttcaagcgattctcctgccttagcctcccaagtagctgggattacaggcatgtgccaccatgcctggctaattttgtattttcagtagagacaaggtttctccatgttggtcaggcaggtcttgaactcctgacctcaggtgatcctcccaccacagcctcctaaagtgctgggattataggcgtgagccatggcagctggcctaatttttgtatttttagtagagacaggttttcaccctgctggtcagactggtctcgaactcctgatttcaagtaatccactcaccttggccttccaaagtgctgggattacaggcgtgaaccgccgtgcctgaccgtggcgttagcaatcataattgcagcggccgtataaggagctgcagaagtcctgctccttgcagagtagggctaccccataggcagtgagctcagagcagcagcccagaggcagttctgcaggcgtattgatacccacttttaattatatgcaaattaaggagcagattatgctgacatttctagaagaaaggcagtaacttttgggttgctgggttgttgcaatggaaagggatggttacgtctgggtgttgccatggcaatggtaaactgatatggtacacagatggggaagtactttctgcctttgcctgtattagctagtcctcaatcaggtccgttgtctgggcccacctgtggagtcaagagccccgcctcttatttcaacagtctttaatgcttatggaagttgtgagaattcagtgggttgacaaatggtgagattggtgaatactgaac[138 bp omitted]cctcagcctcccgagtagctgggactacaggtgcccgccaccac[136 bp omitted]cttttaagtgtgttattattccatgaatccagttcatactttctcaatctcggcactaataacatttgggccagataactcttggttggtaggggtggggtcctgtacgctatcgggtgctgagcaggttctaactactccatgccagaggcatgcccggttctgggggtaaaaatgactccagacattgctcagcatcccctggggacagaatcacccccaggtgaggcctctactgatctaggttaagtgattttaaaaatgacaataattgacggaaaccacgatgaggagattagacactccatatccgtgtaactaaaaatcgagagatgtccataaatttcaagctgcaactatgtgtttttaaaaattgtttaggccaggcacggtggctcatgcttgtaatcccagcactctgggaggtcgaggcgggcggatcacctgaggtcaagaggttgagaccagcctggccaacatggtgagacccgccgtctctaataaaaatacaaaaattagccgagtgtggtggtgcgcgcctgtagtcccagatacttgggagactgaggcaggagaattgcttgaaccctgtaggcacaggttgaagtgagctgagatcgcaccactgcacttcagcctgggtgacagagtgagacgccatctcaaaaaaaaaaaaaaaaaattacaaaagatctcttcaaatgtcacacaggcacactgagggcaacacatgttcccagaccacaaaggaaaagagctgtaaagaacgtgatagcgacaggtggcgaagtgtgcatatggattatatattggataataacatcaagtcaacgtgaaatttcatgaattcattgtatcttcatcattatgtaagggaacagccttgttcttagaggtgcccagtcccttccgggcttattaacaataaacagttgtacatattaaaatgttcacaatgggtgaggtgaggaaagacagtacctgagaggtcatggtactcttcttgcatctttt[148 bp omitted]cccgtctttactaaaaaaaaaaaaaaaaaatacaaaaaattagccaggcatggtagcgggcacctgtagtcccacctacttgggaggctgaggcaggagaatggcatgaacctgggaggtggagcttgcagtgagccaagatcgcgccattgcactccagcctgggcgacagagagagactcctctcaaaaaaagaaaaaaaaa[133 bp omitted]acacggcaaaaccctgtatctactaaaaatgcaaaaatcagccaggcgttgtggctcaagcctgtaatcccagcactttgggaggtcgaggcgggcagattgcttgaggtcaggagtttgagaccagcctggccaatgcagtgaaaccctgtctctactaaaaatacaaaaaattactggggcgtggtggtgggcacctgtaatcccagctactcgggaaactgtggcaggagaatcgcttgaactgggg[137 bp omitted]atggatgaaccttgaggacatcatgttaagtgaaagaaaccagtatgaggagacaaacacataattccagttacatgagttccctagaaccggctaatttataaagacagaaagtaggttggaggttagcaggggctggggaaatggggagtttttgcataatgggtacagagtttctgtttaggaggctggaaagattctggagatgatgatggtgatggtggcacaacagtgaatgtacttaatgccactgagccgttcacctaaaaaggattcaggccaggtgccgtggtatgcgcctgtagtcccagctactcgggaagctgaggtgggaccactgcttgagcctgggagtttgaggctgcagggagctatgatcaagccactgcactccagcctgggggacagagtgagaccctgtctcggaaaaaaaaaaaagttaaaatggcaaatttcatgtgacacagtcatgtattaattgataatggaaatacatgggaggctgaggcaggagaatcgcttgaacctgggaggcggggattgcagtgagccgagatcgcgccactgcactccagcctgggtgacggagcgagacgctgtctcaaaaaaaaaaaaaaaaaaaggaaatgcattcagcaagatgtgtcattaggcaatttcgtcgttgcgtgaacatcatagagtgtgcccacgcacacctagatggcacagcctaccacacacctaggctgtatggtagagcctaatgctcccaggctacaaacctgcacagtatggggctgtactgaatcctgcaggcaactgtaacacgatggtaagtacttgtgtatctaaacatatctaagcatagaaaaggtgcaggaaaaatattgtataaacgattaaaaattggctgggtgcggtggctcatgcctgtgatcccagcactttgggaggctgaggtgggtggatcccctgagttcaggagtttgagaccagcctggccaacatggtgaaaccctgtctctactaaaaatacaaaaattagccaggaggggtggcgggcacctgtaatcccagctactcgggaggctgaggcaggaggattgcttgaacctgggaggtagagatcatagtaagccaagatggcaccactgcactcaagcctgggccagaacaagactccatctaaaaaaaaaatcttattgaacaaccatcataattgcagtctgtcattgactgaaatgttgttatataatgcttaacggtacatattttaccacaataaacacacgtagagtaataagatgtcatttccacgctcaggttgtaagacactgtaacttccatcttgttagccgaatgtattgccttctcagttttcaggcttcaataaagcaatccaccacgttgaagagacccctatgtgagtttgcaagtggctcttttccctttccaatcttttttcttttcttttaggtataggatcttgctatgttgccctggctgggatgcagcggctattcacaggtgcaatcatagtgcactacagcctcaaactcctagcctcaagcaatcctcatgcctcagcctccagagtagctgggcctacaggtacttaacacctcatctggcatcccccagtcagatatttggatgagacccctgccttggctaacaccttgatgaaaacctgtggaaggttctaaggcaggtacgacacagaaacagtgagataatgaatatgattattttaagccattaagatttgaggggctgggcaaggtggctcatgcctgtaatcacagcactttgggaggccgaaatgggtggatcacttgagcccaaaggtttgagaccagcctgagcaacatagcaaaaccccatttctacaaaaattttaaaaattagctgggcatggtggtgtgcccctttagtcccatctagtctggaggccgaggtgggaggatcactaagcccaggagacagaggttgcagtgggccctgatcctgccactgcactccagcctgggtgacagagggagaccctgtctcaacaacaacaaaaaagatttggggctatttgttacacagcaataaataactaatacacgtgtgtgtgtgtgttgtttgtttgtttggttttgagacaaagtcctgctctgtcacccaggctctggagtgcagtggcacgatctaggctcactgaatcctcccccccactgggtgcaagtaattcttctgcctcagcctcccaagtagctaggactacacgtgtgccacaccacgactggataatttttgtatttttaatagagagggggtttcaccatattggccaggctggtctcaaactcctgacctcgtgatccgcctgccttggcctcccaaggtgctggggttacagatgtgagccaccgcacctggtccactattttttttttatcattattattagaggaagtttcataaagagaatgaatatgtgggcttttgtagccaatcctagagggtgggagtccctccctgcctcctagcttgtacttgccccattgggagcctcagttttctcatctgtaaaaggcgaatgataacaatgcctgcttctggggcataagaagcatgagatgcaaataaagcgtttcgctcaggctctgcacgtagggagtggtcaggtacaggggccgtggtgatgccgctgatggctagggggacagggactgtctcctgtcttgtctggtgacatccccttctgaacagagacttggagcctgcaggggtttcagcaattgtttgttgatgctgcaagatctctgtgcccctgccgtgtttgtctgtctgtctgtcagcgtgccctaccctctgtgctcgctggcctggttcgtgatcctcgccgtgtcctgtccacccacttggatgtcctgtcatgtccgtggggggctcggagcgactgagctgtgggggccggagactgggagcgggagctgagggagggagggaggagggagggagggaggcagcgcttgcctggccctcatgatcccccctcctcgtctcttgccgaggaccctcagcgcagccacttctccaggcactcggcagagagaacgcgcgtaggcgttgccctggcaacgccgggatgcccagcaacaagtccgcggcgtgtatcacgtgctcggcgcggaccaatccgagggcccgccgggaagcaggtcagcctgggccaaagtccgcctcctccctcgcggcgagaggctcccagctaattaccgtaattgcggtgggagagctgccggatgcgcgggggctggggctgggggctgggcaggccctgaggagctgagcggggagggctggaaaacaggactctcctccaacagccctgccgctgcctccaaccccaccatcgaagcgttcattaggcgcctacagtgtgcacctgctgttggaaggggtgggtttggagtgtttccagtggtggtggggaaccctagcctccagcctgggtaaacctagatttgggggcgcggggaacagatttgactcttaagactcggggtctcatggaaactgtccaatcgccgttggctgtattgaaccaatccccccctcccccatcccgatgggtcacggtttcctcctgcacaaaaatacaaaaagtttaactcttgaagagggtgtattaaaagatttgcctctgggtggacagaattcacatcccgtctctgccatttgcggctgtgtgactctaggtgagtcccttaacctctctgagccctcgactcctcatcagttaaaagaacaaataggaccaggcacagtggctcactcctgtaatctcagcactttgggaggccgaggcaggcagatcacctgaggtcgggagttggagaccagcctggccaacatggtgaaaccccatctctactaaaagtacaaaaattacccgggcccggtgacaggcacctgtagtcccagctactcgggaggctgaggcaggagaattgcttgaacctgggaggtggaggttgcagtgagctaagatagcgcattgtgctccagcctaggtgacagagcaagactctgtctcatattattgagagaatgtgtgtgaagtgtgcagcaagtatttaataaacagcagctaatcatcaccatggtcccagctctcagttaggagctgtgagaccttccaagtgtcatttaatggcactgagccccaactgtttccatagatgaggtgaaggagtgggagaagtggcctcgtgtcagattccctgccactgcagtttgtttcctacacaatgttctctgggttgtttttctttctaattaataatagctcaaggccaggtacagtggctctcacctgtaatcccagcactttgggagacctggcggaggcaggaggatctcttgaggccaggagttcaacaccaccctgggtgacagactgagaccatgtctctaaaaaacaatagaaatttaaaaaaagaaagaaaattagctcaaagtgggggccttcatgtgaaggcatttaaatttctgattcctagactacctgatttttttttttttttttgagacggagttttgttcttgttgcctaggctggagtgcaatggtgagatcttggctcaatgcaacctctgcctcccgggttcaagcgattcc[132 bp omitted]tcggcctctccaagtgcagggattacaggcttgagccaccacgcctggcctagctgatctcttcttaactcctttccagttatttgctttgtttgttcttttgtcgacaagcattaattgagcacctagtgtgtaccaggctctactgtgggtctgagtcctcagcctcgctgtgctgaactcagggtccaactgagccggactgcagggcagcttcgaggagtaaatgagacccttcagtcattcagtgaatttcaggcattgggaaatacagtgccaatagttgtgactatcgcattgaccacaggaagtggcccaggacctcagtggacgggaggacacatctgatcatcgttcattttcaccagtgctgatttcctcctccaggtctttcctcccgctcgctgttccatctttcccggaagactttcctctgagcaggccctctgctcacctgctccgggaacagcaggagcaaagacacaaatggcagagcctctgaggggctcccctgggtgtacccccctccaccactgtggctgccaggaactgtcttcctatctgctcccctcttagaagggcagtcaccagacggcagttgcagagaaggactgtacttggaagttgtttttattgttgtagttgttgtttttgagacagggtcttgctctgttgcccaggctggagtgccgtggcacgataatagctcactgcagcctcaacctcctgagctcaagccatcctcctgcctcagcctccagggtagctcggaccacaggtgcatgccactatgcctggctaatttttgtattttttgtagagtcagggtcttgctatgttgcttaggctggtctcaaactccggcctcaagtgatcctccagtcttggcctcccagattactgagattacaggtgtgatccactgtgcctggcccagaattttgttaatatgcatatttcaggagcctctgcaagctaagaagggagaatacaacttccatgcaagggcctcccaggactcagggctggtgagcaaaccaggtctgcaggaacttggcttgactctgcagcccaaaaggcacattttggaggcttgggtctggtcccacttcagactcaggtaccaaccacagaatttggctgaaagtggggactctggtctcaaaaggcagctctctctgtttctctgctgtgtgagcctgggcaagagtctcaactctctgtgcttgcttctgcccctgggacatggtgctaataagcaccaagcttggaaagttaacgtgaggacgagatgaagagaagagccagcacctagtaggttttcaataaatggtagctggcattatcatttacacagattggggactgattggaaggaagccgtgacggccacagaaccaacagaaagctagaaaatcgcttttgagaacaggcagatgccaagagaagagccattgaggggagcagcaagatggcaggcagggaaatatcaagcctagccccagacagactccgtctttcagtaggactacgggctagcaatccaacctctgtcttcttcccttttccccatctttcaaacaggaacaaaacaacaggtcctggttccctggaggatgagggtgtgagttggaacagatacccttggagaggttccggaaggttccagaaggttctggaaggttctggaaggtccaaatctggacctcatcgtatcattgacaaatatctattggggctcaatattttcaggacacggtgcttcatgttagggctgccagaaagtatggcaagccaagacaagaaacatcaaagacggggataggaaagctggattctagtcctggctgggcctctgacgtgctgtttgagctctctgggcctcaaggaattgaaaagtaggggggttctataataggaaggccacccttcagagcccttctctgccccctgcttgctaggtgtccttggggaaaatgtctccacctctctgggactcagtttccacatcagaacagtgagattcagtcactgtgctgcaggacagctttgaggagtaaattagattatttagtcattcaatgaatttcaggcattgggaaatacagtgccaattaaaatggggcatgacctggctctctatggtctataaaacgcttagcacatagtgaatgacagacaatgagtaccaccattgggccatcatcatcacccgtaaagtgctcggcacaaaatagatgctcagtaaaccctagttagtaatactgcagcagtagttccaggacctacattgcaagattctctcctctcccactgtgtccaaagcattaacgtgccaggaagcaggaactgagacctttattagggattccctgggtggcctcaggtggggagggtgacctgcgtgtggtcctgttttcatgccctgcctcttctaggtaaacgcctctgctaatctccccttgcccaggctgcaggtcaggtttcggggccccaggcagatgttgtccagagtagccctgtttccttaatcctcagggctccagaaattgtccttagaagaaagaacaacagacccgctgaggtcaccatctgtgcagtcttgatttgtaaatgctcatgagggtggcaggaaagaggtctctatagtaacggctgaggaaggggctgcgtgtgtgtgtgtgtgtgtgtgtgtgtgtgtgtgtgtgtgtgtacgcgcacatacagggaggaggaatcacccaaggcccttattcctagacttttcttttctaccctgatgagctattaattaatactcattgctggcttgttattcccagagataattagctactgttcctaactggagtcgtggggccattttctaaatagattcgttcgcctctgcccacccacacctgtctatctcccgggacacaaggaaatgttacagaacacagagacccagagaggagaaaaactgaacaaaggggtctctctgggaagctcagattccaagtgaatagacaagagcagagcctgaatgagcaagggcccagtgcacagaaagttattataaaaatgccagctatagctgagagtggtggctcacgcctgtaatcccaacactttgggaggccaaggcaggaggatcacttgaggtcaggagttcgagacgagcctggccaacgtggtgaaaccccatctctactaaaatacaatcgctctggaaaagtttgacagtttcttatgaagttaaatatacacttcccatatgacccagccgtcaccctcctaggtgttaccctggagatgtgaaaatttatcgcccacatgaaagcctgcatgaaaatatttatagcagttttattcctaataatctccaaacacagaaggtgttccagaacctaatgtccttggactgatgaatagctaaacaggccatagttcatccacatgatggaatactacttaataataaaaaggaactaactccgggttcacacaacagcatgaatggctctccagtgtattctactgaggaaaggaagccaggccaggcgtggtggctcacacctgtaatcccagcaatttgggagaccgaggtgggtggatcgcttgaggtcaggagttcaacaccagcctggccaacatagtgaaaacccatctctactaaaaatacaagaattagctgggtgtggtggcggacacctgtaatcccagctactcgggaggctgaggcaggagaatcgcttgaatccgggaggcagaagtcgcagtgagtcgagatcatgccactgcactccagcatgggcaacagagtgagatttcatctctaaaataaaataaaataataaaaaataaaaataaaaagtagcaaacgtgcatgtgggcggagaatgtacacacttatatatgcatgtacttctggaagggcacaggaaatgaaatgaacaattgataagagattaaaccttggggttggcagactggggtccccaactcccacaccctctccctgtggtccttgggcaagccccttcccctctctagccatctataaaacatgcatatcagccaggcatgatagctcatgcctggaatttcagcactttgggaggccaaggtgggaggattgcttgagcccaggagttcaagaccaacctgggcaacatagggtgaccctgtttctacaaataatttttaaaattagctgggcatagcggtgcacacctacagaaggctgaagtaggaggattgcctgagccaggaggcagagactgcagtgagccatgattgcactactgcactccagcctgggtcacagactaagactctgtcttaaaaaaaaaaaggtctttcttcctttttttttttttttttttttttttttgagaaggagtcttgctctgttgcccaggctggagtgcagtggcacgatcttggctcactgcaacctccttctcccgggttcaagtgattctcctgcccgagcctcccaagtagctgggattacaggcacccgccactatgcccagctaattttttgtatttttagtagagacgaggtttcaccatgttgaccaggctggtctcgacctcctgacctcgtgatttgcccgctttggcctcccaaagtgctgggattacaggcatgagccactgtgcccagtcaaaaggcctgctttcctttctctctctctctctctctctctctctctctctctctctctctctctctctctgtctattttgagatggagttttgctcttgttgcccaggctggagtacaatggtgcaatcttggctcattgcaacttcaaactcctgggttcaagcgattctcctgcctcagcctcctgagtagttgggattacaggcatgcaccaccatgcccagctaatttttgtatttttagtagagatggggtttcaacatattgtccagtctggtctcaaactcctgacctcaggtgatccacttgccttggcctcccagagtgctgggattacaggcatccagccaaaaagaactttctttctttttctttctttctttccttctttctttttctttctttctttctttctttctttctttctttctttctttctttctttctttcttctttctttcttctttctttctttttctttcttttttctctctttctctttctccttccttcctttctttgttcttcttcttctttttttttaacagagttttgctcttattgcctaggctggagtgcagtggcacaatcttggctcactgcaacccccacctcctgggttcaagcgattatcttgcctcagcctcccaagtagctgggattagaggcacgtgccaccatgccggctaattttgtatttttagtagagtcagggtttctccatgttggt[132 bp omitted]ggtctcgctctgtcacccaggctggagtgcagtggcatgatcttggcttactgcaacccctgcctcccgggttcaagcgattctcctgcctcagcctctgtagtagctgggactacaggcacccgccaccgcactcggctaatttttgtatttttagtagagac[131 bp omitted]gccctgaggccttcagatcactcagcaggtagaatgtctggcactgaccctggcacagagtaaaagcttagggaaggggagagagaaagggtggcaggtcttcctgtgcaacctgaggaacttcacttttgtcctggcctgaatgatcaggtcctgtacagctgtccctgatttatatcctaactgtcccttctatgcttgctcaccccccagggcctgttctttcccccacccccaccagggcccttacactgactgttccttcaacccaatgcccataccaacatgtgagcagagttttcatgtctttaccctccctaaaggcaaggttggttgctgaattcatgtatgtatctccagtgcctagtacaacaagtttgttgagcaaataaatgggtggaatagatcaggaaagaataacagctgcattattagaaaacttaccgtaaacagacatgattgctagtgccatgccaagccatattgggacctcaggcaaaaggaaaagtcagaaaggctggttctgcctttatttacatttttgatattttgttcattgtggattttggcatacattttgatttcttaaaacattgcatcgatttttttttgagacagggtcttgctctgtcacctaggctggagtgcagtggtgcaatcataactcactgcagcttcgacctcctggcctcaagtgatcctctcacctcagcctcccaagtagctgagaccacaggtgccattctctctctctctctctctctctctctctgtttctctctttctctctccctctctccctctttctctctcagaaacggggtctcactatgttgcccaggctcatcttgaaatcctggcctcaagtgatcctcccaccttggcctcccaaagtgctcagattacaagcatgagccattgcacctggcctgaaatattatttaccttgattattgagttttttggtgcccctttaagttttgcacctgaggctggtgcctcacccaactcacattagcccctgccctgattatttctaacatgcaatccacaccatatcattagttcctcagcaaatactctactattatcactacttcacagttgcaaaaactgaggcacaactgtgcccaatgtcccaaaggaaggagaagaaaaatctgaacttgaaccccagtttcttcgttttttggttcagagcctgcccagtatagcactacaataagctgaattttataaattgggttttgagttaaggaatcaaaagcttcaggcttaagtcccacctctgccccagagtcttctgagccctccattttcacagacgtcagttgccctaggtggaactggactttaatattctccacatcccttattttttcccaaaacagtttaccagctttttctttcctgaaccaggagcaatagcaaaaattgggaatgggaagaaacaggtaccagccaggacacctgaacgaacttggagctcaggaacccaggaggggattggagagagtggggagactccatggtccacaatgaatgctccttccccatccgaaaaaatcccctagcccagtttttgggcagatgccagacttttattctgaagcgtgggccacaacctatgaggtaatctttggagcttcattctgaggcggaatcccattggccagttggggaagcccctcccaggattcctggcgctccgccttccctgaagcctataaaagcgcaggtccccgcctcggcagccacgggacacctgcatctgccaacaagactggaagcaggtgaggcacacagagggggaggcccgcagctgcgtgggaggaggggtggtctgagggacgtgggatgccgggaatgaggctggtttgcaggttggcgcatggacattttcccagaaagggacagagacggcgaagtttgacggtctggaaagcagagaccagcagggctgactgcttgggaggtaagttctggggacatggtacagggtgaggagcaggtatcagtgctagttgcgacccctctgtgtctcccccccgccaccccattgccattctgaagctccccaggaagaagctaggaggggaaataaattgagtgggggtggggtttcccaagaatcggaggaaccgagaacgaagaggggtgggggaacggggaaagagagaggaaaatcaagttttcttcagcacgagggacagctctccaccgaccgaaggaggagaatgctatttatttcagcaccaaatatccggacagcgcctctcgggaggtccgagaagagaaccgcgatctgtttcagcaccggggctcaggacagttcccagcgggctccgtttcgtctccagaaccctggacagctcctccaggtaacgggagagccctttgaccctgattttgcagggggaggacgagagagggtggtctgaggtgcctggcatttctggagacctgcacctcatgtaatggatttttaaacaaagtattttccagataagcacacacagaagtctgcaattttctttttttttcgagacggagtcttgctctgtcgcccaggctggagtgcagtggcacgatctcggctcactgcaacctctgcctcctgggttcaagggattctcctgcctcagcctcccgagtatctgggattacaggcacatgccaccactcccggctaatttttgtattcttagtagagacggggtttcaccatgttggccaggctggtctcaaactcttgacctcttcatccgtccacctcagcctcccaaagtgctaggattacaggcgtgagtcactgcgcctggcccaagtccggaattttcaacaggtaagatacctcactggggtaacagctgcctgctaagatgacattatggtgtctcttccagacttcggtgagaaaccttgtgccaagcattttacatacatcatatcatgccatcttcaaccctaggacatgggtgttactgtgcccatgtgacatttggggaacccaaggccctgagaaaggcagaaaaataacccacgcagggactctcagcccacaagtgaagctgtaagtcaaccccaccagtccaactccaaatcccatgtctctgacgtgcctgggtgggaggtgggcccttggagatcagaccctgcttctctccaggagaaccgggaatggaaaacagggaggcagcacagaggcaggaaactcaggtgtcatagcttggctcaggtgagaaggaggagctgggcaggggtctcagacatggggcagagggtggtgaagaagattagagtggctgtggtctagtgctgtgtggaagactagtgattttgttgttctgatgtactacgacaacaagtcacagccggcctcatagcgcagactcccttcgaccttcgccttcaatgggctggccagtgggggagaaccggggaggtcggggaagaatcgcttccactcggagtgggggggctggctcactccaggcgatacaggcacaggcaaaggagggaagcaaacaaggacatacatcctgtgctcatacagccatgcaccatgtatggggtttgtcacatcactcgtacgcccccacaagcctggagatagaacatacctgactctaaacccaagacctctaaccaccttatggcgctttcctgggagacccaatgagggaatgacatttaaagccctccctagaccagagttctcagggtacttttctattaaaaaaaaaattattatttttttggccgggtggctcacgcctgtcatcccagcactttgggaggccaaggcaggtggaccacttgaggccaggagttcaagaccagcctggacaacatggtgaaactccatttctcctaaaaatacaaaaattagctgggcgttgtggcacacacctgtagtcccagctactcgggaggctgaggcatgggaatcccttgaacccaggaggcagaggctgcatgacccaagattgcaccactgcactccagcctgggcaacagagagagattctgtctcaaaaaacattttttttttcttttttgtaaagacatggtctcctgcctcagcctctcaaagtgccaagattacaggtgtgagccaccgaacccagcctaaggatacttttcaataaaagttccagaagtgggctgggtgtgggagctcatacctgtaatcctaacattttgggaggatgagatgggaggattgcttgagtacaggagtttgagaccagcctgggcaatatagtgagaccccgtgagttgacacatgcctgtagtcccaactacttaggaggtgggaggaacacttgagcctgggagatcaaggctgcagtgagccatgactgcaccactgcactccagactgggcaacagaacaacaccctgtttcaaaaaaaaagtttcagaaaagattcctttcctgtctgctacccatcagtgtcatgggccaatcataggacaagtgtgaacttgtgcccagtggtgacttatgacatcataaaggctcaccacctttgccagacatggtggctcacacttgtaatcccagcactttgggaggccaaggtgggaggatagcttgagctcaggagttcgagaccagcctgggcaacatagcaagacctcatctcagtaaaaaataataaataaataaataaatatataagactcactcccaattctctgcaacaccctaatcaagtgaaaaactgcacatggttacctgttctccagcctcagggcttttgcctctgctgttcctgcagcttggaatgcactccctccacctccaaccagagctccccacaactgaccctgccttcttctgcaagctccatttcatcaagggaaacgatccttattgcctcaccatttcccacgtgaagtctgtattgacattctcatagacctgggatattgtgtctgcagcacatagtccaattattttcatgttatctactgacaggtctatttgtctccctgttacactgtgagctccgtgagggcagaaacaatgttagtattttcactgctgtgtccccagcgcctggtccggggcccggcacacagcaggcatataataagcatgtgttgaatcaataaaggcatcaaagaataaaccaatacatcaatcaataaatgaatgaatggcctcagcacacacaggaagatccttcttctaggtctcccccagagagatactggagggcaatggttgctggaggtgtttattggggaagcataattgaatttgtggacacttaagggccggccagccaactcacagccccaagagagagagccaggctcatttaattagcaattacaaggcactgattcctcattagctctggcaaccctcgtctccctcctcagccccagacaaatgaaatctttctctctctcccaggagtactgcctcagtgggtccattaacaagcagagaaaatgagattagaagacacctaaatgccagaggcactttatgaatgggctgagcagagggaggttcaatgtctgggttaggtctaattgtgggaggtttcctggtctatttagaattgccccctgggaatgcaaggtctttcagaaaggaaaaggcacacagatattgccttctggggtcctcaatggaggaggacattctgctatgggtgtctcccagtcaccccaaattaatcatttcaaagtgaacactcaatctgcccagcccctagcttcctcccctgacatgcccatgaatatgacagtccctctacatgcccaagatcctcccctcctcatccactccccatgatccccaagatgagtcactgtgctcaaatccatcctctctcctccagccctctgcctccatgacctccctccagccctctgcctccatgacctccgcctccctgcatgtccggatctcctcactgtctcccctctgagcatacacacacatacagcctgttcattctctacatgcagcgaggggactttccagaacacacatctgaccaagttccactcctgcctgtcacccttccaagagccccactgactgcagaataacgttcaaatatccggttgggcgtggtggctcatgcctgcagtcccagcactttgggaggccaaggtgggtggatcacttgcacaggaccacaggcgtgtgccaccacacccagctaatttttatatttttggtagagacggagtttcaccatgttggccaggctgacctcaagtgatccacccgcctcaacctcccaaagtgctgggattacaggcatgagtcactgcaccggtctaattttttcagagtctcactcttgcccaggctggagtgcagtagcatgatctcggttcactgcaacctctgcctcctggtttcaagcgattctcttggctcagcctcctgagcagctgggattacaggcacgtgccaccacacttagctaatttttgtatttttagtagagatgggggtctcaccatgctggcacagttggtcttgaactcctgacctcaagtgatccacccacctcggcttcccaaagtgctgggattacagacgtgagccaccgcgcccggccagcctttattgattctttttaaagccacactaaccttttattttcccccaaagacccctgggagccctcagtttttcctggcagtttcatctttgtacccctgacctccccacacacacgcctagctcagtgctggcatccaatattcactttgggtataaatgcttgtgcctgagcctatcaccttcatcacacagaaaatcctggaggccacacacccctgtaaagacgagccattacccacagaggtccaaccaacttaccaccctctcccagccacccccaaggacccagcttgcagctgcctgctcaatggctttagaaactaaaaaaggtgaatgagtttccatcactgccctcctgggctttgccgttatggctggttaacttgacagaagaacacattatacttcattttttgctgttgtcttgttggaaaaaaaagtgacagctgggtgcagtggtgcacactgtagtcacagctactcaggagaattgcttgagcacaggaattggaggctacactgagcaatgatcgcctcactgcactccagcctgaacgacagagcaagaccctcttaaaaaatacgtgagagagggtgcgtatgatggctcatgcctgtaatcccagcagtttgggaggccaagacaggtggattgcttgaactcaggagttcaggactaacctcgccaacatggtgaaatcctgtctctaccaaaaatacaaaaaaaaaaaaaaaaatgtcgaacatggtgtcacgagcctgtagtcccagcttctcagaaggctgaggtgagaggattgcctgagcttgggaggcggaggttgcagtgagctgagatcgcaccactgcactccagcctgggtgacagagcgagaccccatctcaaacaaaacaaaacaaaacaaaacaaaaaaaacgggcatgatggctcacacctgtaatcccagaacactttgggaggccaaggcaggcagatcactaggtcaggagatcgagaccatcctggctaacatggtgaaaccccatctctactaaaaatacaaaaaaaattagctggccatggtggcgtgagcctgtagtcccagctactcgggaggctgaagcaggagaattgcttgaacccgggaggcggaggttgcagtgagctgagatcgtgccactgcactccagcctgggtgatagagcgagactctgtctcaggaaaaaaaaaaaaaagtgtgagagagacccccttctcccctggccatgagcaattaaattatgattttaatcacccagagttaagtgtcagaatccacaggttagccaggtgcaatgtctcatgtcctgtcatcccagctacccgggaggctgaggtgggaggatggcttgaggccaggagtttcataccagtttgagtcttactatgttgtgggcaacatagtaagactcccctctcttaaaaaagaaagaggaggctgggcgcaatggctcatgcctgtaatcccagcactttgggaggccaagacgggtggatcacctgaagtcaggagtttgagaccagcctggccaacacagtgaaacctgaatctattaaaaatacaaaaattagccgagcgtggtggcacacgcctgtaatcccagctacttgagaggctgagctgggaggatttctttaaccaggaaggcagaggttgcaatgagccaagattgtgccactgcaccctggcctgagcaacagtgagtccgtttcaaaaaaaaaaaaaacaaaagcagtcactcctcattcttcttcccacactccagcccctggcaaccatttatctgatttctatctctctggattggcctgttctggacatgccatagaaatgggatcacacactgtgtggctttttgtgtctggcttctcccacctgagcctgacgtcctcaaggttcttgtagcctgtgtcagagcctcattccttttcatggctgagtcatattccattgcatggatataccacattttccttatccagacgctgttttgatggctttagacacatgatctcctgcgaggttggtggtcttattgcaccctattttgcaggagaggaaactgaggcccagggaggtcaagcaagttgctcgaggttgcacagctgctggtggcatagccaggacttcaatccaggcagtatcatctagggtctgcaagttgaacccctaccttctacccctctaacagtttagtattcagagactatgtagcaattattatcattttttaaaaaatggagtctcactctgtggcccaggttggagtgcagtggtgtaatctcagcccactgcaacttctgcctcctgggttcaagtgattatcctgcctc[134 bp omitted]cggcctcccaaggttctgggattatgggcgtgagccaccgtgcccagcccaatccaggcagtttgatccagtctgcaagttgaacccctaccatccacccctctaacagtttggtattcagagacaatgtggcaattgtaatgtatctctatcattttcccagggaaggatgccaagacacagacaggagtttgtggcggtcacccagtgaatcatccccagctagggctggaactgaagcctcaggcttggggaggggtcagttcagaaaccttgagggtcttctctgacgcctgcttggctcccttgtgtatgttttggagaatttttttgtagggaggcaagtgagggaggagggcagaacttaaatgctgcaacattcaagggctcaaacggtggttgcctcccactagggagggcagggggccgccagagagagccttgattatgtcctgcaccttaatgggtccttcctaagagagtggctttggtttccatgacaacaagccggcagcatcagagcaagatagtggagtctcctcccccgacccacatctggttctggaatctctacccctctatcccagtcattccaaatcgcaggaatccagctgtggctcagcccaagaccagagggggcagccacgcagtggacagcgctccttctctgtggcctagcaggcaggaggacccctggccctgccccacgctggtaaggaagagatgaatggacagaaatagcgtatgccgggcctggcacagtgggttacgcctgtgatcccgcactttggaaggccgag[132 bp omitted]tgaggcaggagaatcgcttgaacccaggaggcagaggttgcagtgagctgagatcgtgctactgtactcaagcctgggcaataagagcaaaactccgtcttgaaaaaaaaaaaaaaaaagctacagccaggaagggagcagtggctcatgcctgtaatcccagcactttgggaagccaaggagggatgattgcttgaggccaggagttcaagatcagcctgggcgacatggcaagaccatgcctcaccaataagtaaataaataaaaaattagttgggtgtggtggcacgtgcctattgtcccagctacttgggaggctgaggaaggaggactgtttgagcccaggaggaggaggctgcagtgagccatgattgtgccactgcactccagcctgggcgacagaacaagcccctgtctcaaaataacagcaagaaaacaaacaaaacaaaacaagacaaaaaaactctacagctaacagtacacttaatggtacaagactgaatgctttccccctagaatgggactaagacagagacgtccagctctgtagcccaggctggagtgcaggggtgtgatctcagcttactgcaacctccacctcctgggttcaagcaattattgtgccccagcctcccatgtagctggaattacaggtgtgcaccaccacgcctggctaattttttgggggtaattttagtagagacaaggtttcaacatgttggtcaggctggtctcaaactcctggcctcaagtgatctgcccacctcagtttcccgaagtgctaggattacagatgtgagctaccatgcccagccgactctcatcattccttccttccttccttccttccttccttccttctttcctttcttccttccttctttccttctttccctttctttctttctttctctttctcttccttccttctttctctcttccttctttctttctctctttccttccttccttctttctttctttcttttctttctttcttccttccttccttccttcctttcttccttccttcttttttcttttctttttttttgacaaaatctcactctgtcgcccagactggagtgcagtggcaccatctcggctcactgaaacctccgcctcccggattcaagtgattctcatgcctcagcctccctagtagctgggatcacaggtgcccaccaccatgcctggctaatttttgtattttggtagagatggggttttaccatgttggccaagctagtctcaaactcctgacctcaggtgatccacctgcctcggcctcccaaagtgctgggattataggcgtgagcgaccacatccagctgccacttctattcaatattgtattggaggttctagccagtgcataagaaaaaaaaaaaggcatccacattgcaaagaagtaaaactgtgtttattcacgggtgccatggttgtctatgtagaaaatattacagaatctacaaaagattgcaggctccaagaacaatataaaacattaattatatttctatatactagtaacaatctttcagaaattgaaattaggccaggcatggtggctcatgcctgtaatctcagcactttgggaggccaaggcaggcagatcacaaggtcaggagatcaagcccatcctggctaacacggtgaaaccctgtctctactaaaaatacaaaaaattagccaagtgtggtggcgggcgcctgtagtcccagctactcaggaggctgagggaggagaatggcttgaaccggggaagcagaggttgcagtgagctgagatggtgccactgcactccagcctgggtgacaggcaagacttcgtttcaaaaaaaaaaaaagaaaaaagaaagaaaattacagaaaattgtagacataaaagtttctcttttacttgttatgaggaagcagacatcctgggcaacatagtgagaccccgtctctacaaaaaataaacaattagccaggcatggtgatgcacctgtaatcccagctacttaggaggctgaggtagaaggaaagattgcttggccctgggaggtcaaggctgcagtgatctatgattgtaccactgcactccatccagcctgggcaacagagtgagatcttgtctcaaaaataaataaataaataaataaataaataagagagagaaaaagcaggtatgcctgctactccataacatttctgttagaaggctagatgagggttgtctcttaaggtccttaatgaaaaagaaaaaagacaggttcttttttttttttttttg[135 bp omitted]cacgcctggttaattttttgtatttttagtagagatggggtt[133 bp omitted]ctggtctgtaactcctgggctcaagtgatcctcccatcttgtccaccaaaattgctgggatttcaggtgtgagctactgtgacctgcaagggacctcatctttgatggagaatttccctaaaatgctccttttcttaaatagggtctcactctgtagcttgggctggagtcagtggcatgatcatggctcactgcagccttgacttcctgggctcaagagatcctgctgcctcagcctcccaagtagctaactataggcacacaccaccatgccaagctaatttttttattttttgtagaaatgaagtatcactgtgttgcccaggctggtctcaaactcctaggctccagtgatccttctgccttggcctcccaaagtgttgggattacaggcatgagccaccacccccagccaaaatgctgtctgatgagcaagggatgtcaatacaatacggaatgtaccatacctgccaggttgtccatcctctgcatttttggtgctgtctcttccttccac[224 bp omitted]gaggcaagagaatggcgtgaacctgggaggtggagcttgcagttagccaagatcacgccactgcactccagcctgagcgacagagcaagactttgtctcaaaaacaacaacatcaacaaaaaaaaaaaaaatccacaaacatctaactctgttttcttgtgaagatccaattctctccccttgaaagtgggctagacttggcaaatacgatgtggcagaagtgacactatgacttctgaggctgcgtgataagaggtgatacgatacagcttatgcctggttctctctctggatgcttgctcctgggacccagcagccatcttgtgaggaagctcaagctacatggaggtgttcctgccggcagtcccagttgaggtccttcaagatgactccaaccccagcctccttctgacttgaaccacatacgaactgcccccagtgagaactgtctagcagagtccactctcagaaccatgacaagtaataataataggttgttgtttatgtcagtaaccttgaggtcgtttgttaagtcaatttaggtatctagagcaatctggaccatttgtttcttccaaagttctacctaaaaaaaaatccctgtccaggccagacatggtggctcacgcctgtaatgccagcactttaggaggctgaggtgggcggatcataaggtcaggagattgagaccatcctggctaacgcggtgaaaccccatctctactaaaaatacaaaaaattacctgggcgtgatggcgggcgcctgtagtcccagctactcaggaggctgaggcaggagaatggcgtgaacctgggaggcggagattgcagtgagccaagattgagccactgcactccaacctgggtgacagagcaaggctctgtctcaaaaaaaaaaaaaaatccctgtccatacttgaagacctagcctcgcacatgaagtatctcccaggttcctccttccctccccagccagatacaatccattcattctcaggctcctgcatccccaaccacacagtctaacttgagttattctcctcccatcagattctgggctcttgagaacaacatctgcttgtttactgctatataaccaggatccagcacacagcccagcacatagcaggtgctaagaatataaataaatgtggctgaatgtttaaatgaatgaagaaatgaaacaaagatacatactaatgccttcaggctgtgctacattatataaatctatctagtcccttcagggagtgggagacacactgagactgtttcttagaaactaaaccatggcatattttcccaatgaacagacaattccccggagaggaaacagacatcgtaaacaaactcttggggaactgtgtgatttggttagtaattatagacaggcaaattaaagctaccagctagcacgtggcacaatcccagttactattactgcaccac[141 bp omitted]tgaaacaccgtctctacacaaaaatacaaaaattagctggacatggtggcacaggcctgtagtcccaggtacttggaaggctgaggtgggaggattgcttgaacccaggaggcagaggttgcactgagctgagatcatgccactgcactccagcctggacaacagagacagaccctttttttttttttttaatcattttcttatatcttatggattctgtaggtcaggagcttggggcagggctccactgggaaggtagccatttgcccaagccaaggagagaggcctcaagataaatcaatctttcccatatctttcttgtttttaagtcagggtcttgctctgtcacccaggctggagtgcagtggtgcgatcatagctcactgcagcctccatctcctggggtcaagatcctcccacctcagcgtctcaaggagctgggaccacaggtgtacatcactgtacctggctaactttttaaattttttcatagagacggggtctcgctgcattgcccacactagtcttgacctcctggattcaagcaatccctcatgtcagcctctcaagtagctgggactacaggcgtgccctaccatactcagctcattctgcccatatcttgatcttgaacttctaggctccagaaatgtggaaaaataactttctgttgtttaagccactcaacctgtgacatttagctatgacagtccaagcagactaatacacttactcctcttctcgtctctttccttttcttttcttttcttttttgagacggagtctcgctctgtcacccaggctgaagtgcagtggcatgatctcggctcactgcaacctctgcctcccaggttcaagcaattctcctgcctcagcctcctgagtagctggaactacaggcgtgcaccaccacacccagctaatttttgtattttgagtagagacggggtttcactgtgttggccaggatggtcttgatctcttgatcttgtgatctgcccgcctcagcctcccaaagtgctgggattacaggcatgagccaccgagcccagacttgtttgttttttttttttttgagatggagtctcattctgttgcccaggctggagtgcagtggcaagatctcggctcactgcaacctccacctcccaggttcaaatgattctcctgcctcagcctcctgagtacctggaattacaggcatgtgccaccatgcacagcttatttttgtatttttagtagagatggggtttcaccatgttggccaggctggtctcgaactcctgacctcaggtgatctgcccgcctcagcctcccaaagtgctgggattacaggggcgagctaccgcacccagccgagaccagtgttctaagtgaagtaactagtaatgaaaaaccaaatactgtgtattctcacataagtgggagctaagctatgggtttgcaaaggcatacagagtgaaataataggtgggacacagtgactcacacctggaatcccagcactttgggaggagaaggagggaggaccatttgagctcaggagtttgagaccggcctgggcagtatagcaagaccccacaagcatctaaaaaaaattagctgggtgttgtggtacatgcctctagacccagctactcaggaggctcaggcgggagggtcacttgagctcaggagttcaagcctgcagtgagctatgattgcaccactgcactgcagcctggacaacagagcaagaccttatctcaaaaaataaaaatttaaattaaaaaaatggtataatggacagtggagactcagaagcggggagggagtggagagtgagggataaaaagctacatactggggccagacgctgtggttcacacttgtaatcccagcactttgggaggccgaggcaggtggatcacctgaggtcaggagtttgagaccagcctggccaacatggtgaaatcctgtctctactaaaaatacaaaaattagccaggcatggtggcaggcgcctgtaatcccagctacttgggaggctgaggcaggagaatcacttgaccccagcagctgggggttgcagtgagccgagatcttgccacggccctccagcctgggcaacagagcaagactctgtcttaagaaaaaaaaaaaagaaagaaaagaaaagaaaagaaaagaaaaaagcaaaacgagaaaactacgcattgggtacaatgtactctacctgagtgacggctgcgctaaaatcccaggcttcaccactaccaatcatccatgtaaccaaaaacaacttgtaccccaaaagctattgaaattaaaaaaatttttttttgtttttttgttttgagacggagtctcgctccgttgcccaggctggagtgcagtggcacagtctcggctcactgcaagctccgcctcccgggttcatgacattctcctgcctcagcctccggagcagccgggactacaggcgcccgccaccgcg[138 bp omitted]cgcagccttaaatgtttttttaagggtccgttttgttttattttgctccctggtctagctcagctccggaatcggtgcagacacgcaatatcctctcagtagatatttatggaataaataaatctgtctcatctttggcattgctatgatggggtctattttgtctttttctctatttatccccatgtttaaaatatttttttattagaaaaaaaaacggaagtcaccttaggatgaaagcgcctcccctcccaaccccccagtggggtttggcatgtctctcgctgtccccatcacctccctggcccgtgcaggtggcctggccgtggttctgcacgggccgccgcgtttaggcggcactgcagctaatgacaccccgcagcgtgtgcctggctggccgcccgagatgtgcctgcgcatggcatggggacgtttgcaagcctggatcctggcgcgggggcaggtagcgggagaacaggcacgcagatggcagaggggctggggcggggacgctcgcctggcgtgggccacagtcacgacccaatcgtagcccccactgtgtctcttcatagttgcatccttggaaaccggcggggctgcaggaaaaaaattaaaaatcagatgaaagaaaataaagcagtggagacctccagaaggtgcccgccccacagaatagtagtcagagtggtgctgtggttacaatgtgcttcctggggtgatgactttattcattccacagatatttattattattattattattattattattattgttattatttgaaatggagttttgctcctgttgcccagactggagtgcaatggcgcgatctcggcccaccacaacctctccctcccgggttcaagcgattcttgtgcctcagcctcccgagtagctgggattacaggcatgcgctgtcacgcctggttaatttttgtatttttagtagagacgaggtttctccatgttggtcaggctggtctcgaactcctgacctcaggtgatccgcccatttcagcctcccaaattgctgggattacagacgtgagccaccgcgcccagcttccacggatatttattgagcacctactctgttctagaaacaggaatgcagcagtgaacacgacagagaagagtccctgaacaaacattctaaatttgttaattatacagcagggtaggttggaaagtgatgtatgctacggggggaaaaataggctgaaaggatcgtcgttccacctcggcctcccaaaatagtgggattataggtgtgagccacagtgctcagtcttaattttcaatattggccatgattaacaactggtaggaaaaaaaaatcctgaaaatataacgatcagctcttgtgagtcagtatacaccaacatctgcacactctggaggggtaaattctgttttgtttgtttgttttgttttgttttgttttgttgagacggagtctctctgtcgcccaggctggagttcagtggcatgatcttggctcactgcaacttcccagggagttggaaggagggaggaggttggagggaggaggttagagggaggaggttggagggagagaggaggttggagggaggaggttggagggaggaggttggagggagggagtaggttggagggagggaggaggttggagggagggaggaggttggagggaggaggttggagggaggaggttggagggagggaggaggttggagggagggacgaggttggagggagggaggaggttggagggaggaggttggagggagggaggagattggaggcaggaggttggagggaggagcttggagggagggaggaggttggagggaggaggttggaggcaggaggtttgctgatttttagcatttgcccatttcctgtggtgtaaatattcaagccaagaatgatttccagctaccaccaaggagccatagaacagggtatgggggctgggcgcggtggctcacacctgtaatcccagcacttcgggaggctgaggcgggtggatcacaaggtcaagagataaagaccatcctggccaacatgatgaaatcccacgtctactaaaaatacaaaaattaactgggcgtggtggtgtgcgcctgtagtcccagttacttgagaggctgaggcaggagaatcatttgaacccgggaggcggaggttgcagtgagccgagatcacatccccgcactccagcctggtaacacagcaagaccccgtctcaaagaacaaacaaataaaaaagaacaggatagtcggaaggaacgtgcagggggaccccagcacacagtatcccggtaccactgggcaggtgcagtggacttgaataacccaggaaacatagaacatagtgggacatagtaacaaaaatagtgaatttgtgagcatttgttatttgttatctttgtttttgttgt[139 bp omitted]cctcagcctcccgagtagctgggaatgcaggcgcccgccaccatgcccagctaatttttctatttttagtagagacgaggtttcaccatgttggcaaggtgggtcttgaactcctgacctcaggttatctgcctgcctcgggctcccaaagtgctgggattgcaggattgagccaccacacttggcctaaaaaacactttttttattttttatttttatttattattattatttttgagacagagtctcgctctgtcacccaggctggtgtgcagtggcacgatctcagctcaccgcaacctctgtctcccaggttcaagcaattctcctgcctcagcctcctgagtagttgggattacaggcgcctaccaccacgcctggctaatttttatagttttagtagagactgcatttcaccgtgttggccaggctggcctcaaactcctgacctcaggggatcctcctgcctcagcctcccaaagtgctgggattacagacgtgagccatcgcacctggccacaaagcacttttagacatgttttctctctcacgctcctatgttctcattttacagatgagaaagctatgttcagggagcttgggccactgtccaaagccatgcagctgtttggccgtggacttggttgttgaatccaggaattcagcttttagaattaacctcttgtctgtgttgagaggcaaatggttcgtaaagtattttcactcaaaacgcttagcctccctacggtgccaaatactataacaggcaaaaagagtgtcccgggggttgaccaaggtccatctggctggagcttctcatgcccctaaatggtcttatggccagtcccaggtgcactgtggaagtctcaaaagtagacatttaacatgcaactttaagctgctgtcctgttattggaccacagtccctctaattttttaaaataaatcctgtaattgcttcgtggaaagaacaattatattgcaag[142 bp omitted]tgaaaccccatttctactaaaaacacaaaaattagctgggtgtagtggcgcgcgcttgtagtcccagctacctgggaagctgaggcaggagaatcacttgaacctgggacgtggaggttgcagcgagacaagatcacaccactgaactccggcccaggcgacaagagtgaaactccatctcccccccgccaaaaaaaaaaaaaaaaaacttcagggtatgtgtgtgtatatttcaaatggttgaactgttcattaaaaacatttcaaatatgccatgaaatcctatttggaggcatttcttcatgttgtaccacacatgagaaagcatcaaaaaacaattggtggccaggtgaggtggctcacgcctgtcatcccagcactttgggaggccgaggcgggcggatcatgaggtcaggagttcgagaccagcctgaccaacatggagaaaccccgtctctactaaaaatacaacattagcctggcatggtagcacatgcctgtaatcccagctacttgggaggctgaggcaggagaattgcttgaacccgggaggtggaggttgtggtgagccaagatcgtaccattgcattccagcctggacaatgagagtgaaactccgtctcaaaaaaaaaaaaaaagaaaagaaaaaaagaaaaagaaaacaacaacaacaaaaaaagaatacttacactcgtaggcattacccaagagaaatgaaaacatatttccacacaaagacctgtacgcagaagtttatagcagctttatttgtaatcatctaaaactggaaagaaccatcacgtaatggataaaagaatggtggctcgttcttgccatggaatacagctccgtaataaaaggcaacgaactgctaatacacgtaacagcatagatgcatcttgaatgcattgtgctgaatgaaagctgcagaccccagaggccgcatactgcatttttccgtttctgtgctgttagtatgaaacgcagagaacagatcagcagttaccagtggctgcgggtggac[360 bp omitted]gaacatcttggttgtgatactggctacatagctgcatgtttgtcacacctgttctctttatttatttttatttatttatcttagagacagggtctccctctgtcacccaggctgaagtacaatggtgcaatcacggctcactgcagccttgacctcctaggttcaagcgatcctcccacttcagcctcccgagtagctgagacaacaggtgcacgctaccacgcccggctaatttttctatttttgtagagatgtgctatgtttcccaggctggtctcgaattcctgggttcaagcaatcctcccacctcagcctcccaaagtgctgagattacaggtgtgagtcaccttgcccggccaaacctgtcctctttattaaaaatgcattttattgtatatatattacacctcgaataaactttaaaaataaagaattcgggtcaccaaagatttctttttcataatataattcattgttgtcaaaaaatgccagggaatggatcaccttacaactgctagaatagctatcatcaaaaagacgaaaggtaacaaacgttggcaaggatttgaagagaacacttatacactactgatggtaattttaattagtatagccattatagaaaatggtatggaagttccaaagaaaaatttaaaaataaaactaccaggtgatccaggaatcccacttctgggtctttatccaaaggaattgaagtcagcacgtcaggccgggcatagtggctcacgcctgtaattctagcactttgggaggctgaggcgggcggatctcccaaggtcaggagttcgagaccatcctggccaacatggcgaaacccgtctctaccaaaaatacaaaaattagccgggcgtggtggtggatgtctgtagtcccagctactcgggaggctgaggcacgagaatcacttgaacccgggaggcagaggttgcagtgagccgagattgcggcattgccctccagcctaggcaacaagagcgagacgctgtctcaaaaacaaaaaccaaaaccaaaaaaccccacaaagttattgaaagaaataaataaaaataaatacgtaaataaaagaaggaaattctgacacatactagaatatacataaatgtatgtaaatgaataaatgaatatatgaatgtgagaataagaagtgagcgcgtcattttttaccgttctcccagctcaaaacgttttcgccccgtccagcttttcggcctcctccgggcgccccctgccggtgggccgcttgcccgtgctccaagcccaaaacagacgcgtcccctctagtcgcttttagccttcggtctcggtcctgattggctcagagtcgctcgtgatcccttttgggaaatgtagtccttaagggtatcgcgcctgctttttctatacgctctgacgcagagatagccacgggaagtacgtcaccaaatttcgccggttcccacaagctaggtcgtgtgacgctgcatgacgggaattgtagtcctcaaattgctagcttccgatgccatgcgctgcgactggaacgccaattcccaccatgccgcgcgctcacagctctcaggggctgtcctgtggcctttggggaagtgtagtcttgagcccccaagattccttttctgttctatggagtgggcccgcgcaaaggactccatttcccggcgtgctgccatccgtcgggtcgcggcagccattttgttccgcccgaggagaccctaagatggcggcgagggggacggtgaaggttgcctcccgcccgtccgggctctgatcctccgtctccccgtcccccggcggccggcccatggcctggcggaggcccgaaccatggacctccgcaccgccgtgtacaacgccgcccgtgatggcaagctgcagctgctccagaagctgctcagcggccggagccgggaggaactggacgagctgacgggcgaggtggccggcgggggaacgccgctactcatcgccgcccgctacggccacctggacgtggtggagtacctggtggaccggtgcggcgcgagcgtggaggccggtggctcggtgcacttcgatggcgagaccatcgagggcgcgccgccgctgtgggccgcctccgcagccggccacctggacgtggtgcggagcctgctgcgccgcggggcctcggtgaaccgcaccacgcgcaccaactccacgcctctccgcgccgcctgcttcgacggccacctggaggtggtgcgctacctggtcggcgagcaccaggccgacctggaggtggccaaccggcacggccacacgtgcctcatgatctcgtgctacaagggccaccgtgagatcgcccgctacctgctggagcagggcgcccaggtgaaccggcgcagcgccaagggcaacacggccctgcatgactgcgccgagtccggcagcctggagatcctgcagctgctgctggggtgcaaggcccgcatggaacgtgacggctacggcatgaccccgctgctcgcggccagcgtgacgggccacaccaacatcgtggagtacctcatccaggagcagcccggccaggagcaggtcgcagggggagaggctcagcctgggctgccccaagaagacccctccaccagccaggggtgtgcgcagcctcagggggctccgtgctgcagctcctccccagaggaaccactgaacggggaatcttacgaaagctgctgtcccaccagccgggaagctgccgtggaagccttggaattgctgggagctacgtatgtggataagaaacgagatctgcttggggcccttaaacactggaggcgggccatggagctgcgtcaccaggggggcgagtacctgcccaaaccggagcccccacagctggtcctggcctatgactattccagggaggtcaacaccaccgaggagctggaggcgctgatcaccgacccggatgagatgcgcatgcaggccctgttgatccgggagcgcatcctcggtccctcgcacccggacacttcctattacatccgttacaggggtgccgtgtacgccgactcgggcaatttcgagcgctgcatccgcttgtggaagtacgccctggacatgcaacagagcaacctggagcctctgagccccatgaccgccagcagcttcctctccttcgcggaactcttctcctacgtgcttcaggaccgggccgccaaaggcagcctgggcacccagatcggctttgcagacctcatgggggttctcaccaaaggggtccgggaagtggaacgggccctgcagctgcccagggagcccggagactcagcccagttcaccaaggcgctggccatcatcctccacctgctctacctgctggagaaagtggagtgcacccccagccaggagcacctgaagcaccagaccgtctaccgcctgctcaagtgcgcgcccaggggcaagaacggcttcacccctctgcacatggctgtggacaaggacaccacaaacgtgggccgctatcccgtgggcagattcccctccctgcacgtggtcaaagtgctgctcgactgcggggccgacccggacagcagggattttgacaacaacaccccgctacacatagcagcccagaacaactgcccggccatcatgaatgccctgatcgaagcaggggcccacatggacgccaccaatgccttcaagaagacggcctacgagctgctggacgagaagctgctggccaggggtaccatgcagcccttcaactacgtgaccctgcagtgccttgcggcccgggccctggataagaacaagatcccttacaagggcttcatcccggaagatctggaggcgttcatcgaactgcactgacctgcccagaacgcctgcaccctcacctctcccctctcctgctgagatgggggaaatccggctgcggcatagcagatgctcgttcttgcctccttcaggcaccaatcaggagaagggttctgcctcccatcccctctacctgcagacagggtcggaggtgttagcgagcctttggtgctagaagcctgcggggtcatgtgctaagaggacagtctttctccgggagcccgctcactcattctgagttaggaaaagacacaagaccttccccacatcctgtctgcctgggttagggaggcctttgccttgttacctagaggcggagggactgaagccattgcgttccttccctgctagaaacacaggaagaagttgaggactgtctgccttccctcgtccctttacctggccagataactccagccgctgaatacagtgttaggactgggggctcctgagatgagagtttgagattcagggaatgagaccacctctcatttcttccagcatgatcgcgccctgctcccgtgccaccgtagtccctggcagacaggcagggctctgcccagggcagcctgccacttgcatagctttcggttggtttggtgttctgtttatttaataagtgggcaggttgcaagcgttgcacagaaattctgagattttactgcctttttttttttttttaagaaagttgtttgttggactccataagtgaatttcaagcagtgaggattttgtggtgcctgagatggccgagggcacagggagtgagctgtatgtgtgaggaatttggtgagcgagataaaagtccacggtgtcaacccctaaaacatgggtgaccgtacatttttatacatctccactctacggccttttacaggctttccgattttacaggcctttccaagtttccattctccttagagagagaactgtgcttccaaacagaaatcaggagtgaccacaaagcctgaaaacactttgccacccagcaaagaactggcacaattggtttgggtctgcattgccatagtgcccgagttaaaactgcaggccactctgccttgcagtggcctctgatttcattgtgggtgcatccacaggtggcccgagctgttctttcagctgctccaaggattgagacccaagtcatcatgaaaaaggcccaagtacagtcttaatgcgataaatccactagctaagacgtcgagtgccaagaccagccttccagccgaggtttggacaaagtctcaggttcccgtgactcagggtaaggtgctggggctgccagaggacctgccccagcaagatttttgtcaagagcgagactccatcagcccaggcagacgggagcaggttcttggccagcgtagacagcagcaaacagcagcagggaagccattctcactgcatcctccctgcagtagccacggccaggcccttaggaggagcagtgaccgggggtgtccagaaatatcctgtccctggatggaaactaggtctcgtttggatttttttttttttttgccgtgttaggaaattatttattaatttacaagacaggttttaactcagccgaggtgggaaatggtgtccctgtccctcccaaagcacagagcacagaaatgaggccgtttacatggcgagtctccgtgctggtgtttaagtcattaaaaagatactcaaagagaatggcctgcctgatgcgtccttggcgtgggttaactggggaagtcggaggtgggtgagtcagtccatggcattggtgtgagtgaacagagagccctagggccacctcccctagccagaggggtttctgtgttacatactggggctttttttttttttttgagacagagtctcaccctgtcccccaggctggagtgcaatggcgcgatctcagctcactgcaacctctgcctcctgggttcaaacaattctgcttcagcctcctgagtagctgagattacaggcacctgccactatgcccagctaatttttgtattttctgtagaggcaggttttgccatgttggccaggctggtctcaaactcctgaactcaagcgatcctcccacctcagcctcccaaagtgctggaattacaagcatgaaccactgcacctggcctctatgttacatactggggctttgtgtaaaatttcatttgaaaaacagtatgttgctctttgaaaaaaagcctgggcaacatagtgagagcctgtctttacaaaaataaaaaataggctgggtacggtggctcacatctgtaatctcagcaccttgggaagcctgggcaacatagtaagacctctgtctctacattttttttttttttttttttgagatggagtcttgctctgtcacccaggctggagtgcagtgacgccatctcggctcactgcaaccgctgcctcccgggttcaagtgattctcctgcctcagcctcctgagcatctgggactacaggcatacaccaccatgcctggctaattgtgtatttttagcagagacggggtttcaccatattggccatgctggtctcaaactcctgaccttgtgatccactcgcctcggcctcctaaagtgctgggattataggtgtgagccaccacgcctggcccttttttgttttcctttatctgccatctcatctcacctccttgtgtaaacttgttccattctaaaattctggttttctccatatcagaacagtcaaacccccaccagaaagcaccaccccgttagctgggtccatgggattttgctgagcccctgccatgtgccaggcaggtttcaggcccccttggggataaggattgagctgtcgatatgaacgtccggttaatccctgtgcgcccgcctcacgtggcagtggggagaggccctgctgtggggcaccgcatgctgcttccatggtgcattgggttggagggctcttctcccgagggtgggtgtctcccatctcttgccttcacacacctgctgtcttgtttcatttgggactggacagtcccacaggtgacagctgttgggctgttgtatgcctgtttggtgttgcatcaaaggagtgggtttgaatcagcaggtgctctcaaagctgtctcctgggagacacagtactagtgagcatttattgagcacctactgtatgccaggcaccattttctgtggttaaatgcactgcctgtttacacaacagccctctaaaggaggaaaaacatatcagagtcccatggatggaagaaaaataatgaagtaggaaaaacggccctcttaagatgaaggtcatctttttttttttttttttttttttttgagacggagtctctgtcgctcaggctggagtgcagtggtgtgatctcggctcactgcaagctcagcctcccgggttcacaccattctcctgcctcagcctcccgagtagctgggactacaggcacctgccaccatgcccggctaattttttgtatttttagtagagatggg[132 bp omitted]ttcaggtgagggctgatccagcagatcccaattattcctaaagacctggttgatagctcccttgagactggggtggggtgggtgtcccaagatgaccgccagcagaaaagagagcatctttctcccagtcaaaagccaaagtaggacctatctaaagtaagtcctggccgggcacggtggctcacacctgtaatcccagcaccttgggaggctgaggctggaggatcgcttgagcctgggagtttgagaccatcatgggcagcaaagtgagatcctgtctctacaaaaaaaaaaaaaaaaaaaaattagccatgtgtagtgatatgtagtcccagctgctactggggaggctgaagcaggaggattgattgagcccaggagtttgaggctgcagtgagccttaatggcaccatcacactccagcctgggcaacagagtgagaccctgtttcaaaaaaacaaagcagggccggg[174 bp omitted]gaggcag[136 bp omitted]ggcaggcgggggaactgaggctactaagagacattaagatgcttaaggacagccgggcgcggtggcagacgcctgtaatcccagcactttgggaggctgaggcgggcggatcacgaggtcaggagaccaagaccatcctggctaacacggtgaaaccccgtctctctactaaaagcacaaaaaattagccaggcatggtggtgggcgcttgtagtcccagctactcgggaggctgaggcaggagaatggtgtgaactcaggaggcggagcttgcagtgagccgagatcgcaccactgcactccagcctgggcgacagagcacaagactccatctcaaaaaaaaaaaaaagaaagaaaaatgcctaaggacacagcgcatgaaggaagggtcgagattggaacccaggaccgtcagagttcataccttgtgctgattctccatccgggacgccagacacatggatccctttcccctgctttctggtgttgttttggcacaagctctcccatccctggggcaggtggccatcctgcctccgcatcctgagcgtctgtttccctcggggatctgccagactcagccccctaaccccaagaaaatcactcacaaaaatcatctgagctaaatgcttgctttgaaagctcagacctggggattgtaactttagcctcataccttctaatgaaggccatcttaaagctctaccagtttcagctgagggccgatccagcagatcccagttgttcctaaagacctggttgctagctcctctgagactggggtggggtgggtgtcccaaggtgatgaccaggagaaaagagagcgtcttcctcccagtcacatcccaagattcgtgaccgagcgcggtggctcacgcctgtaattccagcactttgggagaccgaggcaggtggatcacgaggtcaggagttcgagaccagcctggtcaacatggtgaaaccctatctattctaaaaatacaaaaaattagccaggcacggtggcaggcacctgtaatcccagctacttgggaggctgaggaaggagaatcgcttgaacccgggagatggaggttgcagtgagccgagattgcaccactgcactccagcctgggcaacagagcaagactctgtctcaaaacaaaacaaaacaaacaaacaaacaaacaaacaaaaaactaaaaacatcaagatacgctctgattggaccagcctgggtcccatgttcttccatgacccaatcctagtagcccaggagtgggatgtgccaattggcttggcctgaggagggcccccagagggtctgtaatccatgtgtaactggagttgctgtaaaatggggccatctggctgggtgcggtggctcacgcctgtaatcccaacactttgggaggcc[134 bp omitted]gaggcaggagagtggcgtgaacccgggaggcggagt[137 bp omitted]taaaatgactacctgccgttgatcagtgaagaaaaaagctcagagagctcaagtggagtacctaaggccacacagccaagagggagagccaagtcgtttgtggttaaatgtcctgcctgtttacacagcagccctctaaaggcggaaaaacatgtcagagtcccatggacgggagaaaaataagaataataataaagtaggaaaaacagccctcttaagaggaaggccatcttaaagctctaccagcttcaggtgagggctgatccagcagatcccagagaaacaggctcacagagaggggagggggcttgtctaagcttacccagcccggaagcatcggggtcaaagcttaaccccctgctggaaggtgtcgagagccaggcagccaagcctgacctgggagatggggaagtgggggcccccccaagctcgccgactgcccttcccagcctgctgccagtctgattccacagaactgaagtcgggacctggagttctgctcattcgctcatctactcagtgactttcttagaccctccccagcactttgagggtgtcagtcactgctgcgtcctcagcacccacgccagggtctgtcccacgccaggtggcctgtaaatatgggctgagcaagcgaacagtgaacgagttgggaattcacatcctcctctgactacttggggcagcagcaggggacacaagcaggcccctatggctttgccagaccccgggtgccgccgcccccatggaattgcaggactgttatctgagcaacgtcgacgggggagaacacccctgcccgaggttaaagatagcaccgctcgaatcacatcacaggccgaaaaggccagatgacccaccagggacattgaatccgtgtcccgagaggggtggggcgggggtgtggattcctgcggggagcttcgggactggaaaaaacagagggtgctctgaccgagtgtttaccaaaacatgtattaggcaagacccgggccgaatgtgggtggcaccgcccctgtgctgggccaggagaatgtgcccgcaccggtcccagatcctgtttccccagtgggttgtacaagacaccttgaacttctgcatgaactgggacattcagaattccctggagcaaccccctccctccaccctgtgccttgatatctcctattaaagcttgtgtttgaatgtctgttaatagacatgatttaattattgatattaattcaaatgtattaatttgaattattaacttattaatcatttgatgtcgattaaagcaatgatcttgatccaatgtcatctcctccatgaagtcttcctggattatctaaggtgcagccccacagccagggacagtggttcatgcctataatcccagcattttgggaggctgaggtgggagggttggttgagcccaggagttcgagaccagcctggacaacttagtgagacccactcccctcatctctacaagaaatatataaaaattagctgggtgtggtggtgtgcacctgtgatcccagctgctcaagagactgaggtgggaggattgcttgagcccaggaggtggaggctgtagtgagctgtgattgcaccattgcacttcagcctgggtgacagagagagaccgtctctaaacaaacaaacaaacaaataaataaatacgagttgaatggcatttacatttttttttttttttgagacggagtctcactgtcgcccaggctggagtgcagtggtgcgatctccgctcactgcaagctccgcctcccaggttcacgccattctcctgcctc[220 bp omitted]agatataatttgcaaaacataaaattcaccattttaacatggataattcaggggcttttagtacatttacaaggctgtacaaccatcaccaagatctaattcccaaaaaataaaggttgattttcaaagcctatttaaagaaaaatattaactggctcaagcaatagaaaatatattaaagagccagccacaatggcatgtgcctataatcccagccacttaggaaggtgagatgagatcatcactgaaggcccagagttcaagactagccaacatagcaagacccc[146 bp omitted]aaccccgtctctactaaaaatacaaaattagctgggtgtggtggtgcatgcctgtcatcccagctactcgggaggctgaggcacgagaatcgcttgaacccaggaagcagtggttgcagtgagccaagatcgtgccattgcactccagcctgggcgacagagtaacactttgtctcaaaataaataaataaataataaaaaataaaaatagagacaggggtctcactgtgttggccaggctggtcccaaactcctgggcttaagcgatccacctcagcctcccgaaatatggggattacaggaaagagccactgcgcccagacactccttttcctgggaagataaaaagttttgcagcttcccttggaaactggaaaccgtggcagcctcccagggctataataaggccacagccagtgaacaggttaaaaataaaagatccccgcccaggggcacttggggatggcatttgtgagcccaggcaaaccccagggctgcagcgagacactcttgggggaggggactggagaagagcctgctgtgtggcctcaggctggcatctgccccctctgggctccaattgggctggaaacaacattagacagtgatttccaaagatcccacacctgcgcacccctgacgattaactctggctttaatttgtctctgaggggcctttctggctcatcctagtcccggccttgcagtctcattgtgtgactttgcaaagcgacactacctctctgtgcctcagtttctccatctgcacaatggggcaaagaaagccctggtgacctgccgatggggataggtatttggctgtcattattgttgcaatgtattatttatctatttatttatttttatttttatttttattttttgagacggagtctcgctctgttgcccaggctggagtgcagtggcgcgatctcagctcactgcaacctctgcctcctgggttcaagtcattctcctgcctcagcctcccgagtaactgggactacaggcacccgccaccacacctggctgattttttgtgtttttagtagagacgggttttcaccgtgttagtcagggtggtctggatctcctgacctcatgatccgcccgcctcggcctcccaaagtgctggaattacaggcgtgagccaccatgtccggcctatttatttatttttgaggtggagtcttgctctgtcacccaggctggagtgcagtggtgacatctcggctcactgcaatctccacctcccgggttcaagtgattctcctgcctcagcctcccgaatagctgggactacaggtgcctgccaccacgcctggctaatttttgtatttttagttgagatggggtttcaccatgttggccaggct[131 bp omitted]ggggactgggcacttttcagggagccccctttgggctctctctttggagcaggcccgggaaagagggaccgtcccctcctcagccggggtcgggagaggctggaaccgctgtccgatggtgccctctggtgacactgttggctcattgcggcaccttctgggtccccacagatagttcatgcgccccctgcctccaggcttgggggacacaaggcctgcaccacggtgggccacactggctcccctcggtccctcggagggtccacgctccctcctacccctcagggttgttacctgtgccatgccctccacctggagtgccctttccttcctgggggctgcagagagctctgagcactactggtgggttcaggtccctgtccccgggtccccaccccctattacttctgcatccccatcacacccagggcaagcccacacgagaccacccattcctgtgtctgcctccccttggagctgtgagccctatgagggcagcaacgggatccgtcccagaaaacagcgttcactcgatctgaagccatcccaggcatacagtagatgctcaatacacactgctcaacgagggaatgaacggataatggggggaatgaacaaaatacaccggctagcaggaagcgaacgtggaatcgagaaacggaaaaactgacttgaggccaggcgcagaggctcatgcctgcagtcccaacactggaaggccaaggcgggaggattgcttgagcccaggagttcgagaccagcctgggcaacatggtgaaactccatctctacaaaaaatgtagggccgggcacagtggctcacgcctgtattcccagcactttgggaagatgaggcaggtgaatcatttgaggtcaggagttcgagaccagcctagccaacatggtgaaataccgtctctactgaaaatacaaaaaaattagctgcgtgtggtggcacatgcctgtaatcccagttactcaggaggctgagatgggaggattgcttgagcctgggaggtccaggccgcagtgagctgtgatcgcaccactgcacttcagcctgagcaacagtgagaccctgtctcaaaaaaaaaaaaaaagcagctgggcatggtggtgcatgtttgtaatcccagcactttgcgagcctgaggctgagctggacagattacttgaacccaggagtttgaaaccagcctgggcaacacagcaaaaccccatctttacaaaaattacctgggtgtgatggtgtgcacctgtggtcccagctacgcaggaggctgaggtgggaggattgcttggcctggaagtgttgaggctgcagtgagctgtgatcagaccactgcattccagcctgggtgacagagtgggaccttgtttcaaaaataaataaataaataaattaattaattaattaattaatttttaaaaagacttgggcatccaccgggtgtggtggctcacacctgtcatcccagcactttgggaggccgaggcgggtagatcatttgaggtcaggagctcgagaccagcctgaccaacacagtgaaacactgtctctactaaaaatacaaaattagctgggcatggtggcgtgtgcctgtaatcccagctacttgggaggctgaggcaggagaatcacttgaacccgggaggcagaggttgcagtgagccgagatagcaccactacactccagcctgggcaacaagagtgaaactccatctcaaaaaaaaaaaaaaaaaaaaaagacttggggatcaattcaaattcaaacatttattgagcatctgctatagaccataccttgggatcccacaataaagcccacggacaggcagaccatagacatgtgggccatgaataagttgattgtatttgtctcaaactccaaagtgctgtggaaagatgaagcctattcaggggatctggtgggttctgttttgaatgaattatattatattatattatattatattatattatattatattaatttttatttttttgagacagggtcttgctctgtcacccaggctggaatgcggtggtatgatctcggctcactgcaacctctgcctcccaggttcaagcaatcctcctgcctcagcctcctgagtagctgggattacaggcgtgagccacagtgcccggccaattttatttaattttttaattttttttttttacaggtaccaccaggcccagctaattttttgtatttttgttagagatggagtttcaccatgttggccaggttggtcttgaactcctgacctcaaggcatccccctgcctcggtttcccaaagtgctgggatgacagacgtgagccaccatgtccagccttgaatgaattttaaatgaggagcacgc[132 bp omitted]tcccacctcagcctctggagcagctgggacaacaggtgcccaccaccagctcagccagacggtgatgtttgagcaaagatctgaagcaagtgatgagggagccatgtaggtacctgggggaagggcattccaggctgaagtcacagcctgtgcaaaggccctgaggcaggaccgcacccaacatgttataggaacaacgggaaggctcacatggctggagcagagtgacaaaggccagaggtcaaggcagatgtaaaactgaccctggatttaacaacacaagatcaccaaggaccttgagcagagcagtttctttttattctttttattttatattttattgtatttttttgagacagaatctcgctctgtcgcccaggctgcagtgtaatggtgagatctcggctcactccaacctctgcctcccaggttcaagcgattcttctgcctcagcctccttagtagctgggattacaggagtgagccacagtgcccggccaattttattttattatttatttatttatttatttattttcagacagagtcttgttctgccgcccaggctggagtgcagtggtgagatctcggctcactgcaacctctgcctcccgggttcaagcgattctcctgcctcagcctctcaagtagctgggattacaggcgtgtgccaccacgctcagctatttgttgtaatttttgtggagacggggtttcaccatgttggccaggctggtttcgaactcctgggctcaagtcatccaccagcctcagcctcccaaagtgctgggattacagacgtcagccaccgcgcctggctgagcagagcaatttctgggacatgcggctggggtgggtggtggatggtaatagtttcacaggaaggacaggacaggaagaggatcctgggggaacttctggaaattctgttctggtgcaaagcctgtaggaagtgaagctgcaccctggcccctgccttccagaagggccctttattttcatggccagaggggccaagcgggtcctggctgtgcagcctcagaaacttcctctttcagttcctggagggagcccgcagggtctgggtcatgcagtctctagcttgagcagcagggtgacccctggcaaaggctcagcatcatgccaagcccaggagggcaacagatgcttctagaagaaactaagggccgggtgcagtggctcacgcctgtaatcccagtactttgggaggccaaggcagtaggatcgcttgaacccaggagtttgagatcagcctgggtaacatagtgagattcttgtctttacaaaaaaatacaaaagttagccgggtgtggtggtgcctgcctgtagtccccgctacctgggaagctgaggcgggaggatcgcttgagcccaggagttcaaggctacagtgaaccatgatcttgccactgcactgcaggctgggtaacagaatgagaccctgtctcaaaaaataggatgggcatcagaaaacatattcatgttttgctcagtgagagaaggcagacacaaaaggccacacagtgtgtgatccaatttctttctttttttttttttctgagatggagtctcgctctgttgcccaggctggagtgcagtggcgtgatctcggctcactgcaagctctgcctcccaggttcacgccattctcctgcctcagcctcccgagtagctgggattacaggcgcccgccaccacgcccggctaatttttttatatttttagtagagacggggtttcaccgtgttagccaggatggtctcgatttcctgaccttgtgatccacctgccttggcctccgaaagtgctgggattacaggtgtgagacaccgcgcccggccacgtgatccaatttctgtgaaatgttcaggacaggctcatccacagaaacaggaaggggatgcatgggtgccggggctggggggaggcagtgggcagtgtcagctgatggttccagtgctgctttttggggtgatgaaagtttctgaaattagatagtggcaatagttgcataatatagtgaatacagtaaaaaccactgatgtctccacttaagaaataacaggaccaggcgcagtggctcacgcctgtaatcccaacactttgggaggccgaggtgggcagatcacctgaggtcaggagttcgagaccaacctagccaacatggtaaaacccccgtctcctactaaaaatataaaaaatagctgggtgtggtggcgggcccctgtaatcccagctacttggaaggctgaggcacaagaatcgcttgaaccaggaggtggagatcacgccactgcactccagcctgggtgccggggcgagacgccatctcaaa[133 bp omitted]taaaccccgtctccactaaaaatacaaaattagctgggcatggtgacgcatgcttgtaatcccagctactcaggagttcaagaccagcttggacaacatatgtgaaaccccatctctactaaaaatacaaaaattagctggccgtggtggcgcatgcctgtaatcccagctactcggaaagctgaggcaggtgaattgcttaaacctgtgaggcgaaggctgcaatgagctgagatcaggccactgcactccagcctgggcgacagagtaagagttggtctcaaaaaaatatgtatcagaaagagatcattccaagcaggcacatatagctgcccagcccggtctggctgtgtgtatactgacttccagaaagaaatcctctgtt[139 bp omitted]atggagaaacctcgtctctactaaaaacacaacattagctgggcatggtggtgcatgcctgtaatcccagctacttgagagactgaggcaggagaatcgcttgaaaccgggaggtggaagttgcagtgagccaagatcgcgccactgcactccagcctgggcaacaagagcaaaaactccatctcaaaataaataaagaaataaatgggacattttcttatttttttttcttcctatttttcttcaaggctgttaggctcccagggaatctgggctttcgtggccacgtggggccggcgggcggtggccaccagagggcgctggggcagcgcaaatcgcagctgagcccctagagctggggacctggtcctgcctggagctgccttccagaccttccagaccttcacccatgctgtaccaccttctagaactctctccccgcccgtggctcattccaatgaaggcctgaggtcttagcttacttccttctttcagaaacttcctttaatctccccaggccagtctagggtcccctttggggtcccacagcttccccatcagagcccccatcaccccataactgcctaatactgtctgtctccagcactggacaacatagatttcttttcttttcttttcttttctttttaatggagtttcgctctgtcatccaggctggagtgcagtggtgcgatctcagctcactgcaagctccgcctcccaggttcacgccattctcctgcctcagcctcctgagtagctgggactacaggcgcccgccaccacgcctggctaatttttttgtatttttggtagagacggggtttcaccatgttggtcaggatggtcttgatctcctgacctcgtgatccgcctgcctgggcctcccaaagtgctgggattacaggtgtgagccactgcgcccggcctctttctttcttttttttgagacagagtctcactccgtagcccaggctggagtgcggtggcgtgatctcggctcactgcaacctccacctcccaggttcaagcaattctcctgcctcaggctcctgagtagctgggattaaaggcacgcatcaccacgctcggctaatttttgtatttttagtacagacagggtttcaccatg[136 bp omitted]caggctggagtgcagtgacaccatgatatctcactgcagccttgacttcctgggctcaagggatcctcctgcttcagcctcccagtagctgggacagcaggtgggtgccaccaagcctggctttttatttcattatttcatttcatttcattgagacaggattctcactgtgttgaccaggctgatctcaaagtcctggcttcatgtgatcctcccacttcggcctcccaaactgctgggattacagacgtcagccaccgtgcccgaccctcagggcattcaaaatgaccctgctttacagatctacaggaggtatgtggagacagctgggaatgggagttccagacgtgaggtc[142 bp omitted]gaggaaaccctgtctctactaaaaaaaaaaaaaaaaaaaaaaaaaaaaatttagctggatgtggtggtgggtgcctgtcatcccagctactcaggaggctgaggcaggagaattgcttgaacccaggaggcggaggttgcagtgagccgagattccaccattgcactccagcctgggcaagaagagtgaaactctgtcacaaaatagaagaagaagaaagaagaagaaagaagaagaagaggaagaggaagaggaggaggaagaggaagaagaagaggaagaggaggaggaggaagaagaagaagaagaggaagaggaaggctgtgtcttgccccaagtgccacactatctcagggagaagcaggggcttgaacccgctgttcctgctgccgaggccagcctggctgacctgggacaagtgaaggttcctgggccgaattctttttcagtcactttaaggaacaggaaagggtcctctgaactgggcaggccctgaatgtgcccacatctcctctgctcttgtctctacctggtccagccccagccaacatcactcacccagaccagtgcagtcgcctccaccctggtgccccagcatcagccctggcccaccaaggtctgtcctccctgcagcggccaccagagggcacctgtgagcactggagtcaggtcctgtccctcctctgcccacagccctgcatggctcccacccgcctgggggtcaaagcccaagacctccccatgacccaccaggccctgcttaacctgccccatccccttttcgccctcccctcctccctctctgcccgtcgctcactctgctccagcctcctcgctgttcctccaacacaccaggtgccatctgcccccagggcctttgcatgggctgtgccctctgcctagaaggtcattcccactttcacctccagctcttcccatgactgactccttttcttccccccaggtctcaactccaacaccccctcctagagagccccttcggccacccctgctgaaatt[136 bp omitted]ctgcctcagcctcccgagtagctgggactacaagtgcccgccac[187 bp omitted]gctggagtgcaatagccccatctcagctcacagcaacctctacctcctgggttcaaatgattcttctgcctcagcctcccaagtatctggaattacaggcgcgtgccaccacgcctggctaattttttgtatttttagtagagacgaggtttcaccctgttagccaggatgatctcgatctcctgacctcatgatccgcccgcctcagcctcccaaagtgctgggattacaggggtgagccaccgcacccagcccgaaggctcttcactttctgaaactattttgctttcttcttttataatttgtttactattccttcctctcctcccctacggaaatgacagccaatgactaatcacttctgtctgctgtctgggacaactcccagcacacagtaggcgctggatgaacgttggtcaaatgaaggaatagccagttcactgcccctgctcaggtatttgcagctggttccggcctggatggtccgaaaccctttgttgggaacaacctcactgcaccctggaatctcatctcagaactccactccccaggtttcacttctgggccgctgcggctgccaccgggaccagagctctgacaaagtctgagtcaacaactaaaatagcaagtagtgcatggctgctgggtgattcacaccagcctgcttccatgtggcctggcaatggaggaaggagcctgcaaagtcaaatcaggttgtcaggagggaggggctcctcagcttcccagctcagtgagtccagtttcaccttcgaggaccctcctttgtttcctcccttggaagttcagctccttccattgtgattccccgtttctgatctgtgtgagttttggagtcagaattaatctctttaggcctcggttttccccatctgtaaggtgggtccataatagaagcttctaccttgaggggtcattttgaggatgaaaatgtgtttgtttatttatgtatttaattttttgttatatagatgaggccttcctatgttgcccaggctgatctcaaacgtctggcctcgcctccttacacgccaggacaacgggcctgcaacaccgtgcctccctatttatttttattttattattttattgttatttttggagatggagtttcactctcgtcacccaggctggagtgcagtggtgcaatctcggctcactgcaacctccacctcccgagttcaagcgattctcctgccttagcctcccaagtagctgggattacaggcacccaccaccacacccagctaattttgtatttttagtagagacggggtttta[132 bp omitted]gatacagagtcttgctctgttgcccaggctggagtgcagtggcgcaatctcagttcactgcaatctccgcctcccaggttcaagcgattctcctgcctcagcctcacaagtagctgagactacaggtgtgtgccccatgcccagctggtttttctatttttagtagagacagggtttcatcatgttggccaggctggtctcgaactcctgacctcaagtgatccgcctgccttggcctccaaaagtgctgggataacagatgtgagccaccatgcctggcctatttatttatttattttttaaaaagagttggatgtcttattcagttgataaataaataaatacatacataaataagaaagatgcggctgggtgtggtggcttacgcctgtaatcccagcactttaggagcccaaggcaggtggatcacctgaggtcaggagtttcagaccagcgtggccaacatggcgaaaccccatctctactaaaaatacaaaaattagccgggtgtggtggcgagctcctgtaatcccagctactcgggaggctgaggcaggagaatagcttgaacccgagaggtggaggttacagtgagctgagctctcttcactgcactccatcctgggtgagagagccagactccatctcaggaaaaaaaaaaaatagagatggggtttcattatgttgcccaagctggtcttgaattcctggcctcaagcaaccctcccacttcaacctcccaaagttctgggattaattacagatgtgagccaccacagcacccagtcttgtttatgtatttagacactccagaatcaatacatgttaagtgtccaacaaaccttggctccattcttattcttagaaggtctgtcaccctgaaaaatattaatcccttccatgtgggtccccatacttaatgagtgctgcacctgctacccaggtatggtgtacctgatatgtggttctgcatatgatccgctgaggccttgaaacaacagcctccacagacccatttctcagatgaaaaagcagaggctccgacaggggaggcacttgccaaatgtcacacagtggcatcggagtccaaccttggtgggggcatcaaaggcagaccccaaagaaaaaggaagggctgcagcaaaaactgctaaatgtcccccaatggcattcattcaaattcatgcatttattcactcatccattcattcactcactcattcattcattcactcatcctttcactcactcatccattcactcattcattcactcactcgttcattcattcactcattcattcactcactcgttcattcattcactcattcattcactcgttcattctttcactcattcattcactgactcgttcatttattcactcactcattcactcattcattcattcactcactcgctcactcattcattcattcattcattcattcattcatagctcactgcagccttcggctcctgggctcaagcaatcctcccacctcagcctcctgagtacctgagactacaggcgtgcaccaccacgcccagctaacttttgtatttttgaagagacgcggtctcaccatgctgcccaggctgcaccctccccgccctcaacaatatcttttccctccacctttcctggtattagaaccccgactcgggaggcacacggccgttcagaaaggactacatttcccagggttccttgcggcaggagcagggccatgtgattatattctggccaatgggatgagggcaaaggccggtctatgccctccaagaagaggcgtgcacttcccgcttcctgttcccttttgcgggagcgggagccacgtgttttataacaaatagccaggcagaaggtgtcccagaagacaatggcgctgcggaagcattcaataaatatttattataattaaaagaccgtagcaatacccccaccaccaagacccttcacccagaaatagagagattggaattgtaaacaccgtatccagttctgaccaccctgaaagccagggcatcatcgcgcccgttttgtcctaaatgaagggctcccggacaatgtcctgaaagtggcagatgacctcatcttccactgtccacagggcacagggcagaccggggtgctctatggggtcctggccgatgcctgggtccaggggtgttccccaggtggtcaggcaaggacacgcggtcattctgcctcctgcgtcttgtcctcgggcgcctgggaccctctctggttccacatgtggttgttcagccccagctgtaccatctgtgcgtggtggataatgaggggttgcagccctgggctctgagggggtgcgggtgaggccgtagggaaggctggggactgcgggaagggcagtgactgtggaaaggctgctggctgtggggagggcggtgggggggtgccagcctgccatgcgtgcaggggtggcggctgcgggcaccccggccaagtgggaaagggtggcggggctcccaggggcacctggcccccaaagggcattcgagccccatagggcgccccagtcccaaatgacatgtggctcccaaaagccacctggagctgctccatctgtgcctggtaggacaagtagctctggaggtaggctgagtaggctgcgttcagtgccgccgcctgcatccgctcaccgtccaggtgttggctctgttcccgcagggctcgggtgtcctgttccttcctccacatggcctttcgggcctgaagcctgtggggcttgaaggtgttggccaccttcctggcgaagatctgggagtgttcgtccagccgcaccagcccggagagcaggctggccgtgtcggagctgagctgggccggggagctctccaggggcaggaaggggatgacacagtctggcgacccctgtcgcgtgaggttgctcatcatggcttggttcacctggtgcaggctcaggcgacagtcgaagttggaggtgagaagtaggatgatgaaagctgagtggtctatggcgtcctgcaggcagctcagctccccgcgccccggcacctggaaatcctcgcagaaggtggccccgtcgggcacgccaagggcctccagcttctcccgaacccgcagggcgatgtgttcgtctgccctggcgtggaggatcacaaagttatagaatttctgttccgatgatgattccagggaggaagggaacagggaggagggggtcaggtgagctgaacaaggagtagatgaaggaggaggaggaggaggaggaggggatgtttctggggtggtgggagtaggtgggcacggcttggtatttggagaggtggtatcttctacagaaagttggagtggcgtctggtctttgacagagcaggggtttttgaccggctccagaataggcaaggggagagactgggggcctgcagacccctcggtgcactccactgggtagttggtgctggtttctggagctgcgggggtatcagggaggccagtggaggttgcatctggggccacttcgggaagcccaggaggtgggctgcttggcagctctggtgggctggcaatctcccccgatggcggccagctcatctcctcaggctcctggcagccaccggggacaggctcgggcaccaagctggcctgggggtcgtcacagagcttgctgggcccatgtgggctgcggtgcaggctgaggaagggcatggtaggggactggctgatttccaagttgctggccagggaggcagggctgccagtggatcgcagggagcacccttggctccagtccgaaacaccgtcaatggggcgtgggaggctcctggtcccagagggcaaagccgaggatggtgggaggcagcccagattggactggagcgtccggatgctccctggatccccagcaatgtcccacccacaccggtttcgggcctcatcctgaagttcccccagccggtggtcgtccctggagctgagggtgcggacggcttcctggtaggccacgtcccgcagcgaggcggggcacagcttctcctcagccagcaggtggtacaagcgggccacagcccaggacacatctgggggctcctctgggtcctcggtgctgtccacgccagcccactggcgggccaccagccgggccaccgcatcggccttcaatgcctctagagagatcctggcctcagtttcctggcccagcttcaggagaaccatggcatgcaggaggtcctgcccctggcagcctgggcgtggggtcttcagtttgtgcttcagatacaagagcttgtcctggcctgctgcacctagaatgtcgaaggcgctaggaagtgatgggcctgtgcaggccatgggcacaggtgggtgcagcctccggcagcagaagctggaggtggtgaaggcatgttccacactgccccccgccttctgcacgcccagtgtcccctacccattcactgttccaggttctgcaggagctgcccaagcagatctgtaggaaacaggagaagcaaacacacttacccccaagaaaggtcagcacgggaaggcggcccacacacccccgcctgctttccccgcctgccacccagacctagccaggtgaccttcggcaacacgtcgcctccttcaacttccatttcttcctctgcaaaatgctatgaggccagtgtggtggctcaggcctgtgatctcagcactttgggaggctgaagcaggaggatcacttaagcccaggacttcgagaccagcctgggcaacacagccagactccgtctccactaaaagtttaaaaattagctgggctgggtgagggggcttaagcctgtaatcccagcagttgtggaggccgaggcggggggatcacctgaggtcaggagttcgagaccagcctggccaacatggtgaaaccccgtttctactaaaaatacaaagaattagccaggagtggtggtgcattcttgtaatcccagctacttgggaaactgaggcaggagaatcgcttgaacacaggaggtggtggctgcagtgagccaagatcatgccactgcactccagcctgggcagcagagtgaaactccggctcaaaaaacaaaaaaagtagctgggcgtggtggcacgtgcctgttgttccagctactccggaggctgagatgggaagatcgcttaagcccaggaggttgaggctgcagtgagctatgatggtaccactgcactccagcctgggcaacagagtgagacccagtctcaaaaaaaaaaaaaaaatgctgtcatctgagacttacctggtgttacctgagaggtaaacactattacactattttccccatttacagatgaagaaagcaagacacacagaggtgatgtcacttgcccaaagtcacactatcagtggatggcagaagacggatttcaacccaggcagtctggctgtggaggctgtgtgcctaatggcatacacttacagacttgttttggggaattgagttggattaacacagagatacttctgagcttgatgactgaaagccagtaggtgctcaatacatgcttgctaaatagcctcggctgagcacggtggctcacacctgtaatcccagcactttgggagtccaaggagggcggctcacctgaggtcaggagttcaagaccagcctggccaacatggtgaaaccccatctctactaaaaatacaaaaaaattagccgggtgtggtggtccgcgcctgtagtcccagctactcaggaggctgaggcaggagaatcgcttgaatccgggaggcagaggttgcagtgagcaaagatcgcaccattgcactccagcctgggcaacaagagcgaaaccccgtctcaataaataaataaatagtcagccttctagatggtcctcaaggacccaacatcctggtatttgcagtcttgagcagtccttccaacactgtcccagcgttggactatgacattaacagaatatggcaagggagccaggcaccacatccactcatttttcaagagaagccagagatctagatttttagaaatccgctcattcttctcgggatgacaatcaattccaatatttttaagagactttgtgagtttaaaaaaaagtttgggccaggcgcagtggctcacgcctataatcccagcactttgggaggc[135 bp omitted]gaggtaggaaaatcgcttgaacctgggaggcggaggttgcagtgaaccgagactgcaccattgcactccagcctgggcgacagagtgagactccatctaaaaaaaaaaaaaaaaaagtttggagccaggcctggtggtgtgtgcctgtggtcccagctactcgggaggctaaggcaggaggattgcttgagccaaggaagttgaggctgcagggaaggatacatacatagcattcattcattcatttaagaagtaattttttggccgggcgcggtggctcatgcctgtaatcccagtgctttgggaggctgaggcaggtggatcacaaggtcaggagttcaagaccagcctggccaacatggtgaaaccctgtctctactaaaagaaaaataaaaaaaataaaaaataaaaaatttagccgggcatggtggcgtgtgcttgtaatcccagctacttgggaggctgaggcagaagaatcgcttgaacctgggaggtggaggttgcagtgagccgagatcgtgccactgcactccagcctgggcaaaagaacaagactccatcaaaaaacaaacaaaaagaagtaatttttagccaggtgtggtggctcatgctgctaatcctagcactttgggaagctaaggcggacagatcatttgaggtcatgagttcaagatcagcctggtcaacacggtgaaactcccgtctctagtaaaaaaaaaaaaaaaaattgccagacatggtgttgggcacctgtactcccagctacttgggaggctgaggcaggagaatcacttgaacccaagaggcggaggttgcagtgagccgagatcacgccactgcattccagcctggatgacagagtgaaactccatctcaaaaaaaaaaaaaagtaattttttcagcatctgccatgtattgggtactagtgaatacaccagtatgcagacaaggaaaaacagcaatggactcttccctggagcaactgactgtctaatggtatgttagttatatgtaatatataagcatcatatatattacatacgacaatataacgggcatgtgtggatacacacacacacttacatgcaaccacttatttgagggcttactacatgctatattgtgctccccatctgttctttaaactgggcacagtcctgcctcaggacctttgcactggctgttccctctgcctatatctctgttaccccccagatatccctatggctcactcccttaccctccttcatgtttttggttaagcctgtcctgatcccaccgtgcagatctccctttgacaggggccacaaaatatggcccacgatttttttttttttttttgagacagagtctcactcttgttgcccaggctggagtgcaatggcacgatctcggctcaccgcaacctccgcctcccgggttctagcgattcttctgcctcatcctcccaagtagctgggattacaggcatgcaccaccatgcctggttaattttgtatttttagtagagacggggtttctccatgttggtcaggctggtcttgaactcccaacctcaggtgatctgcctgtctcggcctcccaaagtgttgggattacaggcatgagccaccccgtccagcctttttttttgagacagagtttcactcttgttgcccaggctggagtacaatggtgcaatctcagctcaccgtaacctccacctcccggattcaagcaattctcctgcttcagcctcccgagtagctgagattacaggcgtgcgccaccatgcccggctaattttgtatttttagtagagacggggtttctccgtgttggccaggctggtcttgaactcccgacctcaggtgatccgcctgcctctgcctcccaaagtgctgggattacaagcgtgagccactgtgccggccaattgttttttagttttgtcttgttttgacacagagtctcgctctgtcgcccaggctgcagtgcagtggcatgatcttggctcactgcaacctccacctcccaggttcaagcgattctcctgcttcagcctcccgagtagctgggaccacaggcacccgccaccacgcccagctaatttttgtactttttatagagacggggtttcaccatattggccaggctggtctcgaactcctgaccttgtgtgatccgcccaccttggcctcccaaagtgctgggattataggtgtgagccactacacccagccaattgcttttataaataaagttttattgcaacacagacatcctcactcatttacacacatcgatggctgctttcccactagagtgatggagtagctacaacagagaccatggggtctacaaagtggaaaatattcactctctgacccttgacagaaaaagcttgtagacacctgggttatgagacaggcatgtgattttttttattttccattccacagaggggcaaacatgaccaagatcacacagctagtgactgacagagcagccatttgatgccaatgtttgtaactgtaacaccaaatgccttttaattagtatggggtatgactggctattatgggttcaatcgtgtctctccccaaaatcatatgttgaagtgccaacctccagtagctcagaatgtgactttatttagagaaaaggcctttttttggtttgtatttggctttggtgtttttgtttgtttgtttttgatgttgaaagtatttttatttggccgggcctgacggctcatgcctgtaatcccagcaatttgggaggtggaggtgagctgatcacttgagatcaagagctcgagaccagcctggccaacatggtgaa[141 bp omitted]cgaaactccatctctactaaaaatgcaaaaattatccaggcatggtggcgggcgcctgtagtcccagctactcgggaggctgaggcaggagaatggcgtgaacctgggaggcggagcttacattgagccaagatagcgccactgcactccagcctgggtgacagagcaagactctgtcttaaaaaaaaaaaaaaaaaaaaattagccaggcatggtggcatgcgcctgaaatcccagctactcaggaggctgaggtgggaggattggttgagcctgggaggttgaggctgcagcaagcaagctaagatctcgccactgcactccagcctgggtaacagagcaagaacctgcatcaaaaaaggaaaaggcagggggcattcagatacagacacgtaactgcacagaaggaagatgatgtgaggagacccagggagaaggcggccgtctgcaagctaaggagagtcctcagagggaaccaaccctacaacacctcgatcttggacttccagcctccataactgtgagagaataaatttctgttgcttaagccatccgggctggggcactttattaccacagccacagtagctaatacactgcagatacttgcagtctagatcagcctcaacactctctgtctgtgttgtccagtatggcagcccccagctacctgtgtctactgggcacctgaaatgtggctgtggtagtaaagagacactgaattttaattttttttttttttaggatgaagtcttgctctgtcgcccaagctggagtgcagtggtgcgatcttagctcactgccacccccctctcctgggttcaagttattctcgtgcctcagcctccccagtagctgggatcacaggcacatgccaccacgcccagctaatttttgtatttttagtagagacagggttttgccatgttggccaggctggtcttgaactcctgacctcaagctatctgcctgcctcagcctcccaaagtgctgggattacaggtatgagccaccatgcctggcttgaattttaacttttatccaattttttttttttttttttttttggagacagagtctcgctctgtcatccaggccggagtgcagtgacgcaatctcagctcactgcaacctccgcctcctgggttgaagagattctcctgcctcagcctcctgagtagctgggattacaggttcgcaccactatgcccggctaatttttgtatttttagtagagatggggttgcctcatattggtcgggctggtctggaacccctgacctcagatgacccacctgcctcggcctcccaaagtgttgggattacaggcgtgagcc[132 bp omitted]gaaatcccgtctctactaaaaatagaaaaattagccacgtgtggtggcgggtgcctgtagtcccagctactagggaggctgaggtgggagaatcacctgaacccaagaagtcgaggctggagtgagcagagatcacaccactgcactccaacttgggtgacagagcaagactctgtctccaaaaaaaaataaaataaaataacagagcctgcttaagggtggtggtgaggaggagggagaggagggtcgggagcggtggctcacgcctgtaatcctagcactttggaaggccgaggtgtgtggattgcctgagctcaggagttcgagaccagcctgcgcaacatggtaaaaccccgtttctactaaaatacaaaaaattagccgggtgtggcagtgtgcgcctgtaatcccagctgcttgggaggctgagggaggagaattgctggaacccgggcggcagaggttgcagtgaactgaaatggcgccactgcactccaccctgggcgacagagcgagactctgtcttaaaacaacaacaacaaaaaactacctatcaggtacgacagttattacctgtgtgatggaataatctgtacaccaaaccctgtgacatgccatttagctatataacaaacctggatatgtacccgttaatttttgtatttttgtagagactgggtctccccatgttgcctgggctcaagtgatcctcccaccttggcctcccaaagtgttgggattacaggcgtgagccaccgcggccggcattttatctaatttttaattaattaaggcagggtgcagtggctcatgcctataatcccagtactttagggggctgaggtaggaggatctcttgagcccaagagttcgagaccagcc[137 bp omitted]cacagtgaaaccctgtctctactaaaaataaaaaatattagcagggcatggtggcaggtgctggtaatcccagctactcgggaggctgagacaggagaatcgcttgaaccgaggaggcagaggttgcagtaagccaagatcacaccattgcactccagcctgggcaacaagagcaaaactccatctcaaaataaagaaacaaacaaataaataaataaataaaattaaaataaaaataattagctgggtgtggtggtgcatgcctgtggccccagctccttggtagactgaggtcagaggatcgcctgaggccaggagaatcaaggctgcagtgaccggagatcgcgccactgcactccagcctgggcaatagagtgagacgctgtctcaaaaacaacaaaataaaaaaggtatggaagatgcctcattcgtaatggaacattatattggaccatgttgggtatattgagttaaataaaatatattattaaatgcatttacatattggattaataaaatgtattattaggagatatatatatatatttatttatttatttatatattttggagatggagtcttgctccattttccaggctagagtgcaatggcatgatctcgactcactgcaacctctgcctcccaggttcaagcgattctcttgcctc[222 bp omitted]catctccactacagtccagtaatattggagtatggcccctttttgacacaaggaaacagaggtacagagaagttgagtaagtagtccagagtcacacagctcataagggatacagctggattggaacccaggctgtctggttctagaatccactgagctttttggctccttttaacattttcagatttaacacagactccagcttatgtggacctggttatggggcctgagaaacagcctcacctagttttaattaaactaatgttcaggaaataagcatatggcctaagtactcctctagagaagtggaggataaaaggtttttcctaataatcttaggaaataataataataataataataaaataatgcaggcacaatcggacaataagaaaaaggccagacggccgggcgcagtggctcacgcctgtaatcccagcactttgagaggccgaggcgggtggattgcctgaggtgaggagttcgaggctagcctggccaacatggtgaaaccccgtctgtactaaaaatacaaaaattagccgggcatggtggcgcaagcctgtaatcccagctattcgggaggctgaggcaggagaatcgcttgaacccgggaggtggaggttgaacccgggaggcggaggttgcggtgagctgagatcatgccattgcactccagcctaggctacaagagtgaaactctgtctccaaaaaaaaaaaaaaaaaaaaaaaaaaaaaaagaaaaaggccagatgcccagcttctatctctgttgtaagctctacataaaatgggataaaaatgaaaatgggctgggcgcggtggctcacgcctgtaatcccagcagcactttgggaggcc[134 bp omitted]gaggcaggagaatggtgtgaacctgggaggcggagcttgcagcgagccgagttggtgccactgcactccagcctgggtgacagagtgagactccatctcaaaaaaaaaaaaaaaaagatcctatattcaggtgggaccacaagtcggccaaaactttttgaaatgatcaagacaactacttggaatacggtccaatacccccaccccccgttaagttcgatgatccacgaatcaactgctcttcccacctcccggtgtttcctgggaacggttgtgtgtataacttaccaagcaaaaagcaaacatacattggcacgtaccctccaatttttagctgataagagggcatagatgataaagtgtggagaagggccatgctgggacagggtagcagtggggctgggcgtcatgctgaaaattcattgagtttaacacttagaattcacactcttttttgttttttttattttttttgagacggagtctcggtctgtctcccaggctggagtgcagtggcgcgatctcggctcactacaagttctgcctcccgggttcccaccgttctcctgcctcagcctcctgtgttgttgttttttgacaggatcttgctctgttacccaggctggagtgcagtggtgtgatcatagctcactgcagcctcaacctcctgggattaagaagtgatcctcccactcagcctcccaagtagctgggactacaggcacatgccaccatgcccagctaattattaatgttttgtagggacggggtctggaactcctgggcccaagcgatcctcccaccttggcctcccaaagtgctgggattacaggtatgagccactgcacccagcctacatgtcagtaaaatatatatacatatatatattttttgagacggagtcccactttgtcgcccaggctggagtgcagtggtgcgatctaggctcactacagcctccgcatcctgggctcaagtgattcttgtgcctcactctcctgagtagctgggattacaggagcctgccaccacgcccagataatctttttttttttttttttctgagaccgaatctccctctgtcgccaggctggagtgcagtggcgcgatctcggctcactgcaacctccacctcctgggttcaagcaattctcctgcctcaccctcccgagtagctgggactacaggtgcatgccaccatgcccaggtaatttttgtatttttagtagggacggggtttcaccatgttggccaggatggtctcaatctcttgatctcgtgatccgcctgccttggcctccaaaattctgggattacaggcgttagccaccacgccctgctagtttttgtaattttagtagagacagggtttcaggctgttggccaggctggtctcgaactcctgacctcaatcgatccgcctgccttggcctcccagagtgctgggattacaggcatgagccactgcgcccggcctgtataggactcttaaagcagtgcctggcacacgcatgccccacaaacattagcatgcaagactgaaacctccttgcaagaaggactcaggggagttttgcagaaaacacgacaaagccagccagacttagaatcatcaaggcaggaccatctccacctgaatgcctggcaaatctctaaaatcacgtggtctttcttctcattctctctgcccccccgggcctgaactcaactctatttcagtgactgccccagcttcccccgcccgcctcccctgcccactgccacctccaccttctcgagacccagcaagtttcatttctcactgtccatggctgggacaaagtccactcctcactctgaagagcaggcgcctggcgggacaaaaacacccatggggtaggagggttctggctctgccacctgccggcttgtgtggtctgtttctcagcctcagcttcctcatttataacacccacatgaactggtacttaggatgaatgggagtctgttttgaagctttcatgcgaaaatatggttaaaaagtttagatcagtgcccagcaaggagcaagagcttgatataataatattagtgtgacaataaatattggcagactttttctcttcctcttcctttttaaaaaaatttttgatttttaatttcatttctttttttttttttttttttttttgacacagagtcttgctgtgtcgcccaggctggagtgcagtggcgtggtctgggctcactgcaacctccgcctcttgggttcaagtgattctcctgcctcatcctcctgagtggctgggattacaggcatgcaccaccacgccccgctaatttttgtatttttagtagagacagggtttcgccatgttggtcaggctggtctcaaactcctgacctcaggtgatctgcctgggattacaggcgtgagccacctgcccagccccatttcattttttttagagacagggtctcactctgtcacccaggctggagtgcagtagtgggatcacggctcactgcagccttgaactcccgggttcaagtgatcctcccacctcagcctcccgagtagctgggactacaggtgtgcggcaccacacctggctaatttttgtatttttggtagagacagagtctcacccatgttacccaggatcctgggctcaagcaatccacctgcctcagcctcccaaagtgttgggattacaggcataaaccactgcacccggctaactttctttttgaatttttttgtagaggtggagtctcgctatgctgcccaggcttgtcttgaactcctgggctcaagtgatcctcccaccttgtcctttttaaatgttttaaccacctctcccactctccttcccacactctcatgcagcctttcatgcatcgaatatgcatttattgagcacctactaggtccaggaactgttcaaagtgccactgcatatcaaggcaggcacatctaccctcacagagctcccagtctggttcagggagaccaacagtaagcgagaaaataacccaagatcatttcagagaatgaaaagtaacgtgaaagccatgagccgggggctgtgtggctctgagagactggctgggaaggggctacaggggaccacggtggtcaagggaggcctttggggacaggaggtaacattgagctgagacctaaaggagctgagggaggaggctgggtggagatcagggaggaaagcttctggaaggtgaagccacctgcccaaaggccctggggcaggactgcgcctggtgagctggaggaacagtaaggaagcccatgtggctggataaccgttaggagggggagaaaggaagaaggtgtgtggtggtacagggtgtgaggttgggatcctgggtgtcagggaagagtttggggtgtcagggaggaatttggggtgtctgggaggaatctggggtattcgggagggatcctgggtgttggggaagaatccagggtgtcagagaggggtcctgggtgtcacggaggaatttggggtatcagggagggaccttgggtgtcagggagaaattcagggcgttgagagaaatatggggtgtgaggtaggaagcttgggtgtcaggaatttggggtgagaaggaatatggggtttcaggtaggaatcctgggtgttggggaggaatctggggtgtccgggaggaatctggggtttgggggaggggtcaggctgtcggggaggaagccagggtgctggggaggatcccgacagtgggggaggatctgggccaccagcgcggggagctggaggttgaggggaacgtcaacctcccaacgcgcggcgccaggccccctcctccgcaccggggccctaagagggaggccaggtggcctggagccctggcgagcggcacgggctcagggccaccccccacacccccgacaccttctccacctcaggcccgtcctcgccccttccccacctaccagggatccggggctgccggctgcgccactgggtcctggggtcctgggggctggggcttctgcggagttgcccgcggaccgtagcgcgctgagggcgctggctccaccccgcggcccgcgccctgggaaggaagcgcgccgccccttccgcgtcccgggtgggtgtgggacgtgaggtcacggtttcggagtcctgccccgcagcaccgggaaagtccccgggtcgccccgcacccatgcgctctcttcccaacccttgcggtcacgttcagcaagtgtgagcacctactgtctgcagggggccagaagaactcgcatctgctctcggggagcccacagtcatctgggcgggggtcccagatgagaaagtaatcacaattgtaaagtgggatcatctccgttagtgataggtgctttccaggaaataaatgtagcagctgtttttattttatttctcttattttatttgtttgtttgtttatttatttttttatttattttccgagacggagtttcgctcttgttgcccaggctggagtgcaatggcgcaatctcagctcactgcaacctccgcctcccgggtccaagcaattctactgcctcagcttcctgagtaactgggattacaggcatgtgccaccacacctggctaattttgtatttttagtagagatggagtttctccaccttggtcagcgtggtctcgaactcccaacttcaggtgatccacctgccttggcctcccaaagtgctgggattacaggtgtgagccaccgtgtccggcctcccttttttttttttttttttttagttggagtcttactctgtggcctaggctggagtgcggtagtgcgacctcggctcactgcaacctccacctcatgggttcaagcgattctcctgcctcagcctcctgagtagctgggattacaggcacgtgccaccacacctggctaatttttgtatttttagttgagatggggt[143 bp omitted]ggggtctccctatattacccaggctgctttcaaacttccaggctcaagcaatcctcccgcctcggcctctcaaagtgctaggattacaggtgtgagccaccgcacctggcctatattatttttatcaccacattaaataagatctaataatcacagtgattttgccgtggtgacaagtgtcagatgtgtttctggttgcaatgcaatctgaaagtatctgtggtttttattagggacaaacggacaaagtcccaggtcctgtggttgtcttcattaataattgagggaatggtaattatcagttagagtcagtgaaaataaagatgtgaaatttttttcctccatcagaattcacagacaccctgaacacccctaagaggctcagggaccccaggctgaagttcacctaaaagttcttgtagggagatagcaatggaagttatgttgatgtcaaatcccccacagttccccttattgagtacttctctccagtgagggagaaattttattgagcactgactgtgttccaggaacgtctaggctctgggaatacagtagcggggaagacagaaatggtcttacccttcagggtctccagggctggtgggggagagaaagttaaacacatcctcctggcctctctgtctcccaccccaaaattaccaattcaaggagtgtctcataggtgcttgtacccatgcaaaactgtgcccagactttttttttttttttttttttgagacagaatctcactcagtcaccaggctggagtgcagtggtgcaatctcggctcactgcaacctcagcctcccgggttcaagcgatcctcctgcctcagcctcccgagtagctgggactacaggtgcatgcccccatgcctggctaatttttgtatttttagtagagatggagtttcacc[136 bp omitted]caggccggagtggagtggcgccatcatagctcaaagcagcctccaattctgggcctcaagcgatcctcctgcctgagcctcccaagtagctgggactacaggcacgcaacactgtgttgaattattttttacatttttcttttagagacagggtctcactatgttacccagactggtccccgactcctagctttaagagattgtcccaatttggcctcccaaagtggtgggatta[132 bp omitted]ctgtagccttgacctcctggtctcaagcgatcctcccacctcagcctcccaagtagctgggactgcaggtgcatgccaccatgcctggctaatgtaattttttttttcttttgtagagatgatgtctttctatgttgaccaggctggtttcaaactcctggcctcaagcaatcctcctgccttggcttcccaaggtgttggaattacaggcgtgagccaccatgcctggcttgatcaatgtcttaaaacaaccgtttctccatcaaaatgggtttgatggttcccattttacagatgagagaacaggctcagagaaggtaatggctgaagaattcagaattccagggctgcagatgggtgaatttggccacttgcagagaggtgcagttgccccctctcttcttcagtgaaagaaacaggccgggtgcggtggctcatgcctgtaatcctagcactttgggaggctgaggcgggaggattgcttgagcccaggcgttcaagactagccctggcaacacagtgagatcccatctctacaaaaattaaaaataaagaaaaaatgagggccgggtgcagtggctcacgcctgcaatcccagcactttgggaggccgaggcaggtggatcatgaggtcaggagatcaagaccatcctggctaacacggtgaaacccctgtctctactaaaaatacaaaaaaattagccgggcgtggtggcgggcacctgtagtcccagctactcaggaggctgaggcaggagaatggtatgaacccgggaggtggagcttgcagagagccgagatcacgccactgaactccagcctgggcgacacagcgagactccatctcaaaaaaaaaaaaaaaaagaaagaaagaaaaaatgaggcatggcagcacgtgcctgtagtcccagctacctgggaggctgagatgggaggaccaccagagcccaagaggttgagactgtagtgagctatgatcgcaccactgcactccagcctgggcaacagagagaaaccctatctcaaagaaaaaatataaaaaaaaaaaagaaagaaagataatattccagtaaaagtccaagttttttttttactttccctctccaccacctcccctagaagcctccacc[139 bp omitted]tacttcagcctcctgaatagctgggattacagctgtgcgccaccacgcccagctaatttttgtatttttagtagagatggggtttcaccatgttggccaggctggtctcgaactcctggcctcaagtgatctgcctgcctcagcctcccaaagtgctgggattacaggcatgagccaccatgcccggcctctgttttccacttttgcacacatatccacagatccgtgatcatgatactgaatattcttcgatctgattttcctttttaattcgcataggccagagttcagcaaactgtttgttgt[131 bp omitted]cccgtctctactaaaagtacaaaaaattagccgggcatggtggcaggtgcctgaagtcccagttactcaggaggctgaggcaggagaatggtgtgaacctgtgaggtggtgcggcttgcagtgagctgagatcgcgccactgcactccagcctgggctacagagcgagactccgtctcaaaaaaaaaaaaatttactgtattccattgtcaatatatctttgacactttcacaagtcaacatatgtgtcatgtatgatattccaaaacaggcattgctaccttaa[136 bp omitted]atcctgggctaagtgattcttgtgcctcagactccccagtagctgggattacaggtgtgtgccaccacacccagctaatttttgtatttttaatagagagggggatttcaccatgttggccagcctggtctcgaactcctgacctcaagtgacctgcccaccttggcctcccaaagtgctgagattacaggcgtgaggcaccatgcctggcctgagttcaaattactactcagctattagtagctgaggtggggctgagggtgggctctctggattacacctcattttccctggagataatagcatctatctgatgggattgggaaaaagatcgggtgagagccaggtgcagtgactctcacctgtaatcccagtgctttgggaggttgagtgggaggtcgcttgagcccaggagtttgagaccagcctaggcaacatagcaagacccacatctgtgtgtgtgtgtgtgtgtgtgtgtgtgtgtgtgtataatttagctgagtgtggtggtgcacgcctgtagttcccagatactcaagaggatgaggtggggccagatgtggtggctcacacctgtaacctcagtactttgggaggccgaggtgggcagatcacttgaggtcaggagtttgagaccagcctggctaacatggtgaaaccccatctctactaaaaatacaaaattacatcctggctaacacggt[143 bp omitted]gtactccagccttagccgggcgtggtggtgcacgcctgtaatcccagctactcgggaggctgaggcgggaaaaccactcgaacctgggaggtggaggttgcggtgagctgagatagtaccactgcaccccagcctgggcaacagagtacaactctgtctcaaaaaagagcgaaaaaaaaaaaaaaaaaggctggcatagtggctcacgcctgtaatccagcactttgggaggccgaggcgggcagatcacttgaggtcaggagttcaaagccagcctggccaatatggcaaaaccccgtctctagtaaaattcaaaaattagccgggcatggtggggcacgcaccagtaatccctgtggctgttggttatagggagtggattcctatgtaacattcattgaactgtccctttaagattcatatacttgggtgcatatgaattcaacttgaatatggattaacaaagagaaagtaacatgtggttggtgatgggggaaatgaaccctctcaggacttagggtgggagtgaaaagactgacaatgatttgggcaacagtccagcagtatttagtaagactgagaatgtatcttctccatgtccctgggagaagtccctgaagttccccttctctgtagctaccgtagagaaacactgtagattgtcacttggatttttttccgagatggtatcttgctctgttgcccaggctggagtgcagtagtgcgatcttggctcactgcagtctcaaactcctgggctcaagtgaccctcccaccttaccatgcctggctaacttaaaaaaaaaaaatttgtgtagagatggggtcttg[141 bp omitted]tgtgagaaatcaatttctgttgctcataaattacccagcctggccaggcactttgggaggacgtggtgagaggaacgcttgagctcaggagttcaagatcagcctgggcaacatagcaagaccccgtctctacaaaataaataaatgaataaataaattaccctgcctaagatatttctgttctagcagcagggacagatgaagacacacacacgtacacacatggcctgtatgcagttgtgggtgaagtttattaaggcaatactgaataccagagcatttcaacaaggcttaccacacaggccccagtacctttctactctacaatgaggctcagaagctcagtgtaccaccccatccccaggaggcccacttagaccagaaatcccaagtccattagctacaggctgatattcagggacatcggtgtaaacaaagaagtgggatatgaactatatccctgatttttttttctttttttttttttttgagactaagtctcactcttgtcccccaggctggagtgcaatggcgcgatcttggctcactgcaacctccgcctctcaggttcaagagattctcttgc[137 bp omitted]cagcctcccaaagtgctgggattacaggtgtgagccaccgcacccggcctatattcctgatatttaacaaggaaaaaaaattctgcaggggagaactttcctgaaagatattttttctggacatctctctctactgactgatagggtgaggctcagaacaggcttcttccaagctcagagaggctgagagatgggtcaactgggtgatgcccgttttgagagccttagcttcccaagtggacagcacagaagagctgggaggagtggctagaaaataagtttgaaatgagccccgggttgaggactccagagcacagctgcattatagagacggggcccgctgagtcctctcctctccccctacttcttctcctccggggctttctcagtgattccaggggcaaagggtcccacgagccacgtgacaggtgtgttctgggccacatattccaccatgtggtccagggcctcgcgggcgctggcgacacgctcacggctctgggccagaatgctgctggacaggtcctggaaggagtggatgctggaaaacgtggcctggaggtcctccacctggcggcgggcctgctgcacctggtccttcacattggtggggaggccctgaatgctggaccccagggaggtacaggtggcctgcagttgctgggcaatgtcccggaacatggtgagcgcccgggactcgacctgctgagaagggagatggggacaccaatcaggaccatttgtttcaggaaaggcgatcggagctgaagccagggaaagaggggaagaggggttctaccactgaccttggggcaaacgctttccataggcgaaacttttttttttttttttgagacggagtctcgccctgtcgcccaggctggagtgcagtggcacaatctcaactcactgcaagctccgcctctcaggttcgcgccattctcctgcctc[134 bp omitted]ggcctcccaaaatgctgggattacaagcgtgagccaccgtgcccggcccttttttttttttttttttttgagatagagtcttgctctgttgcccaggttggcgtgcagtggcatgattttggctcactgcaacctccgcctcccaggttcaagcgattctcctacctcagcctcccgaatagctaggactacaggcgcgtgccaccacgcccgtctaacttttgcatttttagtacagatggggtttcaccatgttggccaggctggtcttgaactctacctcaagtgatcggccctccttggcctcccaaagtactgagattacaggcatgaaccaccgcgcccagactcttttcttttaattagaaacaggatctcactttgtcgcccaggctggagtgcagtggcgtgatcatagcttactacagcctgtaactcctgagctcaagttatcctctcatttcagcctgcctgactacaggcactcactaccacgcccagctacatttttaaaattttctgtagagccaggatctcactaagttgcccaggtcttaaactcctgggcccaagtgacctgcccacttcagcctcccaaaatgctggaattacaggcacgagccactgcatttggccactagtcaaattctttaaagggcatagacaaatcaccaaagaagatatagggagagcacatgaaaagctgtttgaccttataagtcattgaggaaatgcaaatcaaaaccataaggaggcctggcatggtggctcatgcctgtaatcccagcactttgggaggccaaggtgcgtggatcaccgaggtcaggagttcagcctgaccaacatggcgaaacccgcatttctactaaagatacaaaattagccgggtgtggtggcatgtgcctataatcccagctacacaggaagctgaggcagaagaactgcttgcacccaggaggcggaggttgcagtgagccaagatcatgccattgcactccagcctgggcaacagagcgagactctgtctcaaaaacaaacaaacaaacaaaaaccccagaggctatcagatgatacccactgtcagtcaagaggcggagaaattggaagcctcgtgtattgctggtggtatagttactttggaaaacagtctagcggttactcaaaatgttaaaccatagaatcatcatatgactcggcaattctagttgtgggtgtgtgcacaagagaaacggaaacatacgtccacacacaaagacatgcacacaggggcacagcaaaaagtagaaacgactcaagtgtccttcggttgataaatgggtgaacagaatgtgatccacccatacaacagaatgtgactcagccatggaacgtcatggggctctgacccaggccacagcatgggtgagccctaaggacgtcacgctcagcgcgagaagccggacacaaaaggccaaacagggtgtgatcccatttctatgaaatgtccaggacaggcccatccagagacaggaggggatacgtggttgggaggaggaggaaatggggcagtgactgctgatgggaaaagggtttctttttaggggcatgagatgagatagggatagttgcacaatgctgagaaccagcgatgtgtatgctttaaatgcgtgacttgtatggtatgcaaatgagatctcaataaaactgttaaaaaaaaaaaaaaggctgggtgcggtggctcacccctgtaatccccagcactttgggaggccgaggagggtggatcatgaggtcaggacgatcgggaccatcctggctaacatggtgaaaccccatctctactaaaaaaacacaaaaaaattagctgggcatggtggcgggagcctgtagtcctagttacttaggaggctgaggcagg[135 bp omitted]acaaaaagtggaagccaggctgggacagcctggaagaactttctaggcagaagttgtaaaccatccggggagaacatagttgaaatcaggtccttgaaaatttccttggccagagagtgagatgagcacagacagggttcgagaccagcctggccaacatggtgagaccccatctctactaaaaatacaaaaattaggccgggcgcagtgggtcaggcctgtaatcccagcactttggggggccaagacgggtggataacttgaggttaggagttctagaccagcctggcaaacatgacagaaccctgtctctactaaaaatacaaaaaaattagctgggtgtggttgcaggcgcctgtaatcccagctacttgggagactgaggcaggaaaattgcttgaacccaggaggtggaggctgcagtgagtcaagatcacgccactgcactccagcttgggtgacggagtgagactctgtctcaaaaataaataaataaatcaaattagctgggcgtggtggcaggtgcctgtagtctcagctactcgggaggctgaggcaggagaatcgcttgaacccgggaggcagaggttgcagtgagccgagatcatgacattgcactccagccagggtgacagagtgagactctatctcaaaaaaaaaaaaaaaaaaaaaaaaggcacacactgggaggtagggttttgcccagagccctggcagctggaggactctggacttgagcgagggattacgggagagtgcccacgtgagagagataagatctggttttttcatttgaaaagtcattctggctgctgtgcttagcagtcggggaaacaggagacagttttaggcagcaggtggtctagttctgcctcccgaacaatttgcatttatagagatattcaccatatctttatgcatgtcacttttgtagcccttactatgtgcttttgatatgatctcatttcagtttttaaaaaatcgatctgggtccgggcacggtggctcacgcctgtaataccagcactttgggaggccgatgtgggcggatcacctgcggtcaggagtttgagaccagcctggccaacatggcgaaaccccgtgtctactaaaaagtacaaaaattagccgggcgtggtgacgcatgcctgtaatcccatctactggggaggtggagacaggagaaccacttgaacccaggaggcagaggttgcagtgagctgagattgtg[151 bp omitted]cgcgtctctactaaaaatacaaaaaaaattagctgggcctggtggcgggcgcctgtagtcccagatactcgggaggctgaggcaggagaatggcgtgaacctgggaggcagagctggtagtgagctgagattacaccactgcactccagcctgggtgacagagcgagactccatctcaaaaaataaataaataaataaataaataaataattgatctggggtcgggtgtggtggctcatgcctgtaatcccagtgctttggaaggctgaagtgggagtattgcttgacaccaggagctcaagaccagcctgggcaacacagtgagatcctgtctctactaaaaattaaaaaaaaaattagccaggcatcgtggcacacgcctgtgttcccagctacttgggaggctgaggcgagaggattgcctgagcctgcaatggcgaggccacagtgacctgtgatggcatcactgcactccagccagggcaacagagtgagaccctgtctcaaagataaataaacaactatttcaaaaattgatatataatccacacaccctaaaactcgccctttgaagtgtacgattcattggtttttaatacattcacaaggttgggcaaatactaccttcatctaatttcaggacattttctgttttttgagacagaatctccttctgttgcccaggctggagtgcagtggtgcgatctcggctcactgcaaacttcctttgcccctggggagcttaagtgggtggtgggacaggcagcgagacccattagagaacacaagaggccaaggcttgagatagagtggagggggccggagaatactagtcagaagttgctgctaggggccgggctcagtagctcacgcttgtaatcccaacactttgggaggctgggcagggcggatcacttgaggtcaggagttcaagaccagcctggccaacatggtgaaaccctgtctctactaaaaatacaaaaaaattagccaggcgtggtggtgagcgcctgtaatcccagctactagggaggctgaggcaggagaatcactcgaacccaggaggtggaggttgcagtgagccaagatcatgccattgtactccagcctgggtgacagagcaacactccatctcaaaacaaaaaacagaagccatacctatgcatgcccaagaggagaaatcaaggcaggcttcctgaaggaggtgtcattagcttccaaaagcaggtgaggctagggaaatcattcgaagcaggtaggcccatgaagcagaggtgtagagagtggcatcgggactccaagtaccctaggccaccccccagtcccctcatgggtacctctggcttgggcggctccttctcggggccctggagctgcttctggttccagctgagccacatctggtgcagcttctcctggccttccaccagcttctgatcaacgccttgcttgacagtttccatctggggcaggggagagagaagtgagggaaggaggctcccctgggagagacgggattccagaaggaacccaaggaatccttccagcatctgacttacatgacagtctagaaaagagaaagggagggagggaggaagggtttcctggctacggtgagctctggggcctttggtttaatcattgacatactcaggctctgtgtggttggtgcaaagaagggctgcacatcccctgtagctcttcccattgtgtcaatttctcctgcgcttgcaagggagcctggacacgtggctggctttggccaatgggacatgagcagatggaaccagcaaaggcttaaaaagtgcttgtaggctgggcatggtggctcacacctgtaatcccagcactttgggaggttg[134 bp omitted]gaggcacgagaatcgcttgaacctgggaggcggaggttgcagtgagctgagattgcgccactgcactccagcctgggtgacagagccagactctatctcaaaacaacaaaaaacaaaaaacaaaaaaaagtgcttgtaatgaaatatgactcagccttccaaaggaacgaagcaggctgacttctgcaatcccagcgctttgggaggccaagggggttggatcagttgagctcagtagctccagaacagcataggcaacacagtgacatctcatctctacatattac[148 bp omitted]aaaatacaaaaaattagcccagcgtggtggtgggcgcctgtagtcccagctactcgggaggctgaggcaagagaatggtgtgaaccaaggaggcagagcttgcagtgagcagagactgcatgccactgcactccagcctgggtgacagagcgagactccgtctcaaaaaaaaaaaaaaaaaggccgggcgcggtggctcacgcctgtaattccagcactttgggaggccgaggcgggcggatcaagaggtcaggagatcaagaccatcctggctaacactgtgaaaccccatctctactaaaaatagaaaagaaaattagccaggcatggtggccggcgcctgtagtcccagctaccagaaggctgaggcaggagaatggcatgaacccaggaggcggagcttgcagtgagctgagatcgcgccacaaaaagaaaagaaaaataaataaagaggaatgatggcagacatatgctccaagatgggtgcacctaagaggctgcagtgagccatgatcatccactccagcctgggcaacagagtgagcccctgtctctggaaaaaaaaaaaaaaaaatcgtcataaaggtaaatgaagctatccattagggtgggctccaatccataaagggctggtctccttcaataaggagattagagctgtgcgtggtggctcgtgtctgtaatcccagcactttgggaggctgaggtgggtggatcacttgaggtcaggagtttgagaccagcccggccaacatagtgaaaccccatctctactaaaaatacaaaaattagccaggcatggtggcaagtgcctgtgatcccagctactcgggacgtggaggcccaagaatcacttgaacccgggaagtggaggttgcagtgatctgagattgcaccactacactcccgcctgggcaacagagcgagactccgttcaaagaaaaaaaagagattaggacacagacatacacagagggaagggacgaccacgtgaatacacagagagaagatggctgtctacgagtcaaggagagaggccccagaaggacactctgatcttggacttccagcctccagaaatgtgagaaaataaatatctgttgtttacatttcccagacagtacgaattttttttttttttttttgagatggagtctcactcttgtcacccaggctggagagcagtagcatgatctcggctcactgcaatctctgccgcccgggttcaagcgattctcctgcctcagcctcctgagtagctgggattacaggtgcctgccattgtacctggctaatttttgtatttttagtagagatggggtttcaccatgttggccaggctggtcttgaactcctgacctcgtgatccacccgcctcagcctcccaaagtgctgggattacaggcatgagccaccgcacctggccacgattttttttttttttttgagatggggtcttgctctgttgactaggctgcagtgcagtggcacaatcatagctcactgcagcctccaactcctgggctcaagcaatcgtcccacctcagcctcccaagtagctgagattacaggcacgcaccaccacagccagctaattgttttaaattattttttgtagagatggggtcttgctatattgcccaggtgggtctcaaacccctggactcatgcgatcctcctgccttgggctcccaaagcacttgagggactcacacaaagaggtgtgagccactgtgcccggccccagacagtgtggtttgtggcagcatcctgagcaaatgagtgtacaaccagatacagtgccaggagcaagcgggaatggccctgccagcctgcagaggggtgagcaataagccactgagctctgggtgggtgtctgctgcggggtgaaggctgctggctcagggccccgaccccctggaacctcaccaggcttaggacctgcgacagctgcagcagagcctcctgtgccctctgcttggtggctcgaagcttgcccagcgagtgctcataggcgtgctgccgcagcctctccgacagggagcccagacgtacgaagtagctctgttcctgccgctgctgctgcacggacgcgacgtcaaagccatccagggatgtggcgatgcgggctgcaaggaaaaggagaagggtctctgtgaagaccagaacacacagctgggctcgtcccatgcagacagtcccaagaatcacactgtccagtttatttatttatttatttagagatggagtctcgctctgtcgcccaggttggagtgcagtggtgtcatctcggctcactgcaacctctgcctcccgggttcaagtgattatcctgcctc[134 bp omitted]tggcctccaaaagtgctgtgattataggcgtgagccaccacacctggccatgctgtccagtttataacccagttctacttcttataaacctcgaaggcctgggagcaaaggattctgccttggttttccctatctgcaaaacggggataaggaaaattaaacctcacaggaatcagagaccttagactagcaggagggtctcaagctatggcctgcaggccagacctgccttggacaacctgtgaatataggcctgaatgttcattatgcagtcctgcagagaataacagcattccagccagcaatacatcacatatactacagaggtcccataagattataataccgtaggccgggtgcagtggctcatgccagtaatgccagccctttgggaggccaaggcgggcagatcacttgaggtcaggagttcaagactagcctggccaacatggcactaccccatctctactaaaaatacaaaaattagccaggcgtgatggcactagcctgtaatctcagctacttaggaggctgaggcaggagaatcgcttgaacccgggaggtggaggctgcagtgagccaagatcacaccactgcactccagcctgggtgagagtgagactccgtctcaaaaaaaaaagagaataatgacatttcagccaacaatggactgcatatactacagtggtcccataagattataataccatatataccgtatttttcctgtactttttcttcttttttttagacagggtctcggtctgttgcccaggctggagtacagtggcacgacctcagcttactgcaggctcaacctcccagcttcaagctatccttcaaccttggcctcccgagtagctgggactacataaagctgggactacggcaagacacctggctaatttttgtactttttgtaggaatggggtctcactatgttgcccaggctggtcttgaaatcctggactcaagcaatctgctcgcctcagactcccaaagtgctaggtttacaggtgtgagccattgcacctggcttcctgtaccttttctatgtttagatctgtttgttttgtcggtttttatattttgaagtacagtctcgctctgttgcccaggctggagtgcagcggtgcaatcatagctcactgtagccttgaactcccaggctcaagtgatcctcctgtctcagctcccaaatagcaactgggactacaggcgtgcactagcacacccagctaatttttaaattttttgtagagatggggtctatgttgtccaggctggtctggaactactgggcttaactaatcctcccaccaaagtgctgggatgacaggtgtgagccaccacgcctggcctcatcccatgttcgtaggttcatatgtgtatatgcatgtatttatttacttatttatttatttatttatttttttgagacagagtctcactctgttgcccaggctggagtgcaatggcatgatctcggctcactgcaacctccgcctcccgggttcaagtgattctcctgccttagcctcctgagtagctgggattacaggaatgtgccaccatgcttggctaatttttgtatttttagtagagatggggtttcaccatgttggccaggctggtctcaaactcctgaccatgtgatccagctgcctcagcctccgaaagtgctgggattacaggcatgagtcaccacacctggcctttattttttttgagatggagtttcactcttgttgcctgggctggagtgcaatggcgcagtcttggctcaccacaagctctgcctcccagattcaagccattctcttgcctcagcctcccgagttagctgggattacagggatgcgccaccatgcctggctaattttgtatttttagtagagatagggtttctttatgttggtcaggcttgtctcgaactcccgacctcaacctccacccgcctcagcctcccaaagtactgggattacagccatgagccactgcgcccagctgcatgtatttatttaatcctgctcctactgtacccatgcttttttttttttgagatggagtctcactctgtcgcccaggctggagtgcagcggcccaatcttggctcactgcaacctctgcctcccaagtagctgggattacagacgcctgccaccgcacctggctaatgtttattttattattattatttttttgagacggcgtctagctctattgcccaggctggagtggagtggcatgatctcggctcactgcaagctccgcctcccaggttcatgccattctcctgcctcagtctcccgagtagctgggactacaggcacccgccaccacgcccggctaattttttttttttttttttttttttttttagtagagatggggtttcactg[132 bp omitted]ccatgttggccaggcttgtctcaaactcttgacttcaggtgatctgcccacctcggcccaccaaagtgctgggattacaggctgagccaccgcgccctgcctatatcctaagctacttatttgcaaaaatcccaatccccgcactttggggggctaaagcagtaggatcactccagccaaggagttctggatcagctgggatgacagagggagaccccgtctttaccaaaaattaaataaagaaaaattagttgggcgtgatggtgtgtgcttgtagtcccagctactcggaggctgagatgggaggctcgcctcaacccaggagttggaggctgcattgagctatgatcgcaccactgcacttcagcctgggcaagagagtgagactctatctctaaaacaaataaataaaaaagggccgggcatggtggctcacacctgtaatcccagtacttggggaggccgaggtgggcagatcacaaggtcaggagttcgagaccagcctggccaacatagtgaaaccccgtttctactaaaaatacaaaaaattagctgtgtggtggcaggtgcctgtaatcccagctactcaggaggatgaggcaggagactcgcttgaacccaggaggcagaggttgcagtgagctgagatcacgccattgcactccagcctaggtgacagggcgagactctgtctctaaataaataaataaattaattaaagaagaatatcaaataaacagtgcagggagtgcgaatatgtgaccgagatgactggagtgggatgtctggcctggcgggaacaccagcattgttgtcacagttcagtgagatctcaagtttagtcacgtatttatgcaggagcggagtggcgaagggggaagaggaggagggcggggagaggacaggggaggttgtgcaggaccttgtgggctgtgacgaggacttgggctttgaccccaggggaggtggggtccatggagggctgtgggcagagggacgggttctgactcaggtggtcacaggcgccctctggtggctgctgtggggaggagactgtggtggatgagggcgggagctggtgagcaggacagaggggactgcgttagtgatgagattccaagatgcccgggagaagtggcagggacgaggcggcagtgagtgtcggcacagaccccaggaggccgacagcggcttccggtcagggggcctggggaggggtcccagagcagcccgctggccacacttacccagttcggcatccgtaaggggcaggtggttgtccgcccactcctccgacttccccagcaccgtgtcgaccccactcaacaccatctggcccaagcgggagcccatgaccgattggacgccgccggtcactacggactttgtcttgtccacgccgctctgcacagcaccgcgggtcgcgtccaccgcctccgacaattgggtggccaccgtgtccttggcgctagacaccatctcttgggcccccgacaccttagacgacacaagctccttggtgtccgccaggacctaggagatgcaacagcatcagcatctctgccttccctccatatctgggcacccctcccctgcaccccaacttccagggagaccgaggcggggagcgccatcccccgggtgaccccagcatctccgtcttccctctgtatgtgggcacccctcccctgcaccccaacttccagggagactgaggcagggagcgccatcccccaggtgaccctgagtctggagttgtgggcatgacctcatactctgcagccagactacctaggctccgttcctagctagctacttctcagctgtgtggcttcaggaaagtcactctacctccctgtacctcatttctttctttcttttttttttttggagacagggtcttgctctcttgcccaggctggagtgcagtgacaccatctcagatcactgcaacctctgtctcccgggttcaagcagttctcctgcctcagcctccgaagcagctgggattacaggtgcccgccaccatgcctggctaattgttttttgttgttgctgttgttgagatggagtttcactctcgttgcccaggctggagtgcaattgtgtgatctcggctcactgtaacctccgcctcctgggttcaagcgattctcctgcctcagcctcccgagtagctgggattacaggcatgcgccaccacgccaggctaattttgtatttttagtagagatggggtttcaccatgttggtcaggctggtctcaaactcctgacctagtgatccgcccacctcagcctcccaaagtgctaggattacaggcatgagccactgcactctgcctgttttttgtttttttttttcaatttaattttttttcttttgagatggagtctccctctgtcacccaggtggagtgcggtggcacaatctcggctcactacaaactccacctcctgggctcaagtgagcctcccacctcagcttccccagcgagtagctgtgaccacaggcacgtaccaccactcgtggctattttttatcttttatttttatttatttattaatttttttgaggcggagtttcactcttgttgcccaggctagagtgcaatggtgcaatctcgattcactgcaacctctgccacgtgggttcaggtgattctcctgcctcagcctcccaagtagctgggattacaagcacatgccaccatgccgagccgatttttgtatttttagtagagacgggtttcaccatgttggccaggctggtcttgaactcctgacatcaggggatccacttgcctgggcctcccaaagtgctgggattacaagcatgagccactgcgcccagccttattttttattttttgtagagacaaaaaatacaaaaaattagccgggtgcagtggtgcatgtctgtaatccttactactcaagaggctgaggcgggagaatcccttgaacccgggaggtggagtttgcagtgagccgagactgcaccactgcactccaccctgggtgacagagagagactctgtctccaaaaaaaaacaaaaacaaacaaacaaaaaaaagctttgcatggaatcctttgactacgccccacccagcacatggtgagcgctcatctgtcaatacctgctgttctcgaatctaagtcttttttttttttttcttttgagacagggtctcactgtgtcactcaggctggagtgcagtggtgcaatcatagcttactcaagccttgacctcttcggctccagcgatcctcccacctcagcctcccaagtagctgagactacaggtacgcaccaccacacccggcttatttttttattttttgtagagacaaggactctccatgttgcccaggctggtttcgaactcctggcctcaagcagtcctcctgctttggcctcccaaagtgctgggatgaccgacatgagccactgtgtccagctgaagctaagtctttagacagatctctatgcagagggctctccgcaaagttgaaaaccacacctgccccattcctacccaagttggtgcttccctgaagactcagtcctcttgtactcatgagagttcatctttttgtgggggaagagggtgtgagagtcaagttttttgtttttgtttttgtttttttttacagagtttttgctcttgtcacccaggctggagtgcagtggcactatctcggctcaccgcaacctccacctcccaggttcaagcggttctcctgcctc[133 bp omitted]gccccactactcagtgaacacgcacgttctcacactggcccggattaaaatctagctctgacaacaccaccgtcccccagaacctggggaaagttacctcttcacaaagggggaaaaaactcatagggcccagaattgagagagcattgcacctctcaaaaagtcaagagctcacagcaggccaggcacggtggctcacacctgtcatcccggcactttgggaggctgaggtgggaggatcgcttgggcccagaagtgtgagaacagcctgggcaacatagtaagacctcacctctacaaaaaatacaaaaattggccgggcacggtgactcacgcctataatcccagcactttgggaggccaaggcagctggatcacctgaggtcaggagttcgagaccagcctggccaacatggtgaaaccccatctctactaaaaatacaaaaatttgctgggcgtagtgatgggcgcctataatcccagctacttgggaggctgaggcaggaggatcacttgaacccaggaggcagaggttgcagtgggctgagatcacgccactgcattccagcctgggcaacagaacgagactccatctgaaaaaaaaaaaaaaaaaaaaaaaaagctcccagctgctgctctgttcagtgaccttgaagaattcaccctgagcttatcccttctataaacagaaagactgttggcctcctacgctatcagtgggagagaaagggaagcaagggcttggccctgagacgggggctcctggttgacgtttcccatcttcctgtaagctcagcagtttccatcccccctcagccaagcccactattggcctttgctgataaggtgtaggcatggctgggcatagtggctcacaactataatcccagcactttgggaagccaaggcaggcaggaggattgcttgagcccaggagtttgttttttg[147 bp omitted]cccattcctacaaaaaattaaaaaattagtcaggtgtggtggtgcacacctgtagtcccagcttctcaggaggctgagagctgggaggattgcctaagtctaggaggtcaaggctgtagtgagccaagatcacgccactgcactctagcttgggctacagagcaagaccttgtctcaaaaaaaaaaaaaaaatgcaagttgacaaccgctctgctgtttcccagctaaggccatttctgcataaatgggaggtgaggaagtctaaccatgatgggacagcacagctccccggcatacagtaggcactcaatagcaagtggatgaataagctgcctgtccctgcaggtggtctcagggaaagtccaaggatgctgggatgcggctggcttgtcctgcctccaacccagggatcacctatttctgatgctacagacccagacacaagcaggtggtacccgagggtggcccttctgtaaccactgggctgaagcggacatgg[132 bp omitted]gaaaccccatctctactaaaaagataaaattacccaggcatggtggtgcatgcctgtaatcccagctactcgggaggctgaggcaggagaatcgcttgagcccgagaggcggaggttgcagtgagccgagatcgcaccattgcactccagcctgggcaacaagagcaacactctgtctcaaaaaactaaaaaaataagcatctaccctgtgccaggctgcctgctgggcactggacacagccacaaagcaggcagcctgtgccctggtcccagctggggagacaaacaataaccgattaagcctcacacttatctgaaggagggtgtttttttttttttttttgagacagagccttgctctgttgcccaggctggagcgtggtggcacgatctcggctcactgcaacctcttgcctcccaggttcaagtgatactcgtgcctcagcctcccgagtagctgagattataggaactcaccatcacgcctggctgatttttgaatttttagtagacacagggtttcaccatgttggccaggctggtctcgtactcctgatctcaagtgatctgcacgcttcggcctcccaaagtgctgggagtaaggcgtgagccaccacgcctggtctgtgcctcattttttcatcccaggctgttataggttgaattatggccccctcaaccccaaattcttatgttgaagtcctgatccccaggggtaagaatgtggctgtatttagagacagggtctttaaaaagcggtgattaagggaaactgaggtagggcacagtggcacactcctataattctagcactttgtggggctgaggcaggaggattgcttgagcccaagagttggagaccggcctgggcaatatggcgagactccgtcttgacaaaaagtacaaaaattagccaggcgtggtggatgcacctagtcccagctactcaggaggctgaggcaggaggatctgttgagcccaggagtctgagaacagcctgggcaacatggtgaaaactcgtctctacaaaaaattaaaaatagccaggcatggtggtgcatgcctgtggtcccagctacttgggaagctgagatgggaggatcacttgagcccaggagttcaaggctgcagttgagccatgatcacactactgcaccccaccctgggtgacagagtgagaacctgtctcaaaaaaaaaatttttttttttaatgttaagagccaacatttgctacaagccatgtgctgttctgggccttcaggtgttaaccccaggtcagcattgccattctgtagaaaagaaagtgggacccaggctgggcctggtggctcatgtctgtaatcccaacactttgggaggccaaggcaggtggatcacctgaggtcgggagctcgagaccagcctgaccaacatggtaaaaccccatctctactaaaaatacaaaaattggccaggtgtggtggcacatgtctgtaatcccagccactcgggaggctgaggcgggagaatcgcttgaacctgggaggtggaggttgcagtgagctgaaactgcaccagtgcactccagcctgggcaacaagag[211 bp omitted]gaggcaggagaatcgctggaacccggaggtggaggttgcagtgagccgagattgcaccactgcacaccagcctggcaacagagcaagaccccgtctcaaaaaaaaaaaaaaaaaaaaaaaagtgaggcccacagaggcaaagtaacttgtgtgagggccacccagct[141 bp omitted]attctcttgcctcagcctcccgagtaactaggactacaggcacacgccaccacgccaagctaatttttttttttgtagttttagtagagatggggtttcactgtgtttgccaggatggtctcgatctcctgaccttgtgatccgcccacctcagcctcccaaagtactgggattacaggcatgagccaccgcgcctggccagaatatggtgtttttttggtttttttttttttttttgagatggagtttcactcttgctgcccaggctagagtgcaatggcatgatctcggatcactgcaacctccgcctccagggttcaagaaattctcctgcctcagcctcccgagtagctgggattacaggcacccgctaccacacccagataaattttgtatttttagtagagacggggtttctccatgttggtcaggctggtctcaaactcccaacctcaggtgatcctcccgccttggcctcccaaagtgctgggattacaggcatgagccaccgcgcccggccaggaacatggtgttttgatgttttgactttcctgccgccaaccttttctgactaataagttatggaggtggcaacattctgtgtaaagggccacgtaactaagattttcagtactgtgggtcacagtctctgtcacaactactcaaccttgccattgtagggtgaaagcagtcatagacaatatgtaaataaatgggcatggctgtgtgccaataaaactttattataaaaacaagtgggctgggcaccgtggctcattcctataatcccagcactttgagaggctgaggcagctggatcacctgaggtcaggagttcgagaccagcccggccaacatggtgaaaccccatctctactaaaaatacaaaaactagatgggcatggttgcaggcgcctgtaatctggctggctttgcaattattcctccagctaccctgtggggagtggattcggggtggggatgggaaccgacaggagaggcagcagggaggatgccatcaagcttgtctagttaagctgggaccagcgcactccacacccaggtaggtccctgtctcgacagagcccctgaggacggacatcgttaccttctccgtgggctgctgcaggatggggaggttctcctccaacttgtccagccccctgtgggcgtattcgctggctgatgcaactgccaacaacaattaagacgcaaatgtgactgctggaaggtcacctagtaatggttcagggggacaggaccaagagctgggtagacccccctactccccacccagggaaatgaccaggaggggaattcagtgccccctgggacttcacccactctggggctccagcttggagaggatcggctgagccccgctgacagcagccgccgtgagggtcctcactcccttctctgctgcgtcgcagacagtcttgatgtgcgggtagctctccttggtggaggcataggctgcggacaccatgtcgcaggtggagctgatcagaggcatgctggccacacggtccaccacactgggctacaggagagaagtggctcaggcaaactgggtgggggaagatggggagctcagccggaaactcagggtgccctgcagttttgctcttactcctggccagtgaaacggctcagtttacccacactttgcatccaggcagttgcacaagccaggaaccttggggtttcgccacgtgcttcctttatttttattttatttttgaaacggagtcttgcactgttgcccgggctggagtgcactgatgcgatctcagctcactgcaacctccacctcccaggttcaaacgattctcctgcctcatcctcctgagtagctgggattacgggtgccaccacgcccagctaatttttttgtatttttagtagagatggggtttcacca[141 bp omitted]tatcccagcgatgtgccaggtggtgataagggacaacagttccattctcatggcagttagggtctaaaccgggggctgtagaccacagcccatgggtcacagccagcgcaccacttgatttttaaattttaattatttttggggccaggagcagtggctcacgcctgtaatccgagcactttgggagaccgaggcgggtgggtcactttgggtcaggagtttgagactagcctggccaacatggtgaaactccgtctctactaaaaatacaaaaattagccgggcgtggtggcacatgcctgttaccccagctacttgggaggctgaggcaggagaattgcttgaacccaggaggcagaggttgcagtgagccaagatgtcaccactgcactccaggctgggcgacacagcaaggttccatctcaaaaatatatacataaaataaaatcacctgaggatgagagatctggaatagaaactggcctcctaggacgtccctgagagagccttcagaggtgaggatgatttggctcaggggttggggagggcaggtagtttcagacagaaccctgctccctcaggccctccaagggcctttgagattcccccctcccaactggggacaccagtgagtggtccataccccactgaggaataaatccctctggctccgtgagctgccggcagatccctggctccctgccagggcaccctggggtgggaagcctccttgcacgggaatcacagggtcggggcagtccctggtcccggcccttcctcacctgctgtaccggttcttccactgtcacctgggtgctgccatcagcctctgccccgtcggcagacatggtctctgcagcagacgctgaggagagaggaacagtcaggtacagcctgcctggccccaccttccaggagaaagtccaggcccacgctgcagctggaagacagggttcacacctgcccatgacttacagctgtgtctttcagtccttagcaggcacaagagtgacctctggactttgttcaatagcaagtgctgattctaaagcttcgggatggggctcacctggccccctatttctttttttttttctttattttctttggagacagtctcactctgtcgcccaggatggagtgcagtggggcaacctgggctcactgcaacctccgcctcctggtttcaagcaattctcctgcct[134 bp omitted]gcctcccaaagtgctgggattacaggtgtgagccaccacacctgatcctttcttttttttttttctcattaaagacagggtcttgctctgtcacccaggctggagtacagtggtacaatcacagctcactgcagcctctaactcctgggcttaagggatcctcctgcctcagcttcccaagtaactaggactataggcacacaccaccacgcctacttaattttttctttttgggtagagatgttatcttttttttttttttttgagacagagtcttgctctgtcgccaggctggagtgcagtggcacgatctcggctcactgtaacctccacctcccacgttcaagcaattcccctgcctcagccttcccagtagctgggactacaggcgtgtgccactacacctggccaattttttgtatttttttagtagaaacggg[131 bp omitted]gctggtctcgaattcctggtctcaaacaatcctcttgccttggactcccaaagttctgggattacaggagtgagccaccatgcccggccctgaccctgcatttctaaaaggctcccaggcagtgttgatgcagctggtccctgggacacacgtcaggaagcaaggcttgggaacagtcccttcagggctcacctgtactccagcaagccaggtatgacctaaaacctctgtagaggacaatttgccaatagctgtcaagttccaagagccatcttccccttgacccagaaacctcacttcggggaagaacccacacctgtgtttccacatgagcagagctgtgtggacttactggccacaacatgacactggaaacaacct[141 bp omitted]aaaccccgtctctactaaaaatacaaacattagccaggcatgatggtgggcgcctgtaatcccagctactcaggaggctgaggcaggagaatcgcttgaacccaggaggcggaggttgcagtgaggtgagatcgcgccactgcactccagcctgggcaacagagtgagactccgtctcaaaacacaaaaaca[143 bp omitted]atggagaaaccccatctctactaaaaatataaaattagccaggcatggtggcgaatgcctgtaatcccagctattcaggaggctgaggcaggagagttacttgaacccgggaagcggaagttgcagtgagccgagatcgcgccgctgcactccagcctgggcaacaggagcgaaactctgtctcaaaaaaaaaaaaaaaagagatttaaatgtaactcacatgggccagatgtggtgggtcacacctctaatcccagcactttgggaggccgaggcaggaggatcacctgaggtcaggaggtggagaccagcctggccaacatggcaaaaccccgtctctactaaaaatacaaaaattagccaggcgtggtggtgcacgcctccatgtttagttatcccagctactcaggaggctgaggcaggagaatcgcttgaacccaggaggtggaggttgcagtgacctggtattgcaccactgcactccagcctgggtgacagagcgagactccatctcaaaaaaaaaaaaaagaaaacaaaacaaaacaaacaaaagactaaatgtaactgacatgacatgaacaaagatctagtcaagggataaaatgtgttaaatagggcaaactttcttctctttcttgagacggatttccgctctgtcgcccaggctgcagtgtagtggtgcgatcttggctcactgcaacctctgtctcctacgctcaagcaattctcccaccttgaccctgcaagtagctgggactacaggcacgcaccaccacacctggctagtgtgtgtgtgtgtgtgtgtgtgtgtgtgtgtgtgtgtgtgtgtgtgtgtgtggttttgttttttttttttggacagggagtcttgctctgtcatccaggctggggtgcagtggcgtgatttcggctcactgtaacctccgccttctgggttcaagcgattctcctgcctcagcctcctgagtagctgggattacaggtgtgcaccacgtctggctaattttttgtatttttagtagagatggggtttcactatgttggtcaggctggtcttgaacacctgacctcgtgatccacccgcctcagcctcccaaagtgctgggattacaggatgagtcactgcactcagccgtggtttgtttttttttttgttgttgttgttgttttgtttgtttgttttttagtagatggggttttgccatgttgcccaggttggtcttgaactcctgagctcaagggatctgcccaccttggcctcccaaactgctaggattacagctgtgagccaccgcacccagccaaaatttaggctttttttaaaaagtgagataacatgcctgcctgcaccgcagagctatgaagtccaggtcaggggtgtggggaggacggggttccccaggtgagtctatgtaagcgggatgaagccacaactcccttttcctggactagtgaaatgaagctgggacaccatcatcagaagagattctcagggggaagccaggagtcccagctccacctacgctatgctccctggagcaaggcgccttcccctcctctggcctcggtcatcttacctgtaatatgaggctaaagggtcgggcatggtggctcacacctgtaatcccagcacgctgggaggctgaggtgggtggatcatgaggtcaggagttcaagagcagcctggccaacatactgaaacactgtctctactaaaaatacaaaaattaggtgcgggtgtggtggcgggcgcctgtagtcccagctacttgggagactgaggcaggggaattgcttcaacctgggaggcggaggttgcagtaagccaagactgcgccactacactccagcctgggt[133 bp omitted]catggtgaaaccccatctctactaaaaatacaaaaattagccgtgtattttggctgacacctgtagtcccagctacacaggaggctgaggcaggagaattgcttgaacctgggaggtggaggttgcagtgagtcgagatcgcaccactgcactccagcccgggtgacagagggagactccgtttcaaaaaaaaaaaaacatggggctaaaggtcatgcctgtcttatgggctgctttcctggggaattctggtgtgagcctaagaacctgtggccttgagtctgagcatcttttcccagaggaatgaggccccacctcctggtggccttgcttcgatgtcccctaagcagaacccagcaaaatgatgatgttttgcaagcactagatctggagtccagattgggttctttccatttttttttttttgtttttttttttgagacggagtctcgccctgtcgcccacgctggagtgcagtggcgcgatctcagctcactgcaagctctgcctccccggttcacgccattctcctgcctcagcctcccgagtagctgggaccacaggcgcccgccaccacgcctggctaattgtttgtatttttagtagagatgggatttcaccatgttagccaggatcgtctcgatctcctgacctcatgatccgcccgcctcggcctccgaaaatgctgggattacaggcgtgagccaccatgcccggcctttttttttttttgagacagagtcttgctctgtcgcccaggctggaatgcagtggcgtgatctcagttcagtgtaacctccatctcccaggttcaagcgattctcctgcctcagcctccagagtatctgggaatacaggtgcccgccaccacgtccggctaatttttatatttttagtagaggtggggtttcaccatgttggccaggctgttctccaactcctgacctcaaatgatccgcccacctcagcctcccaaagtgctgggattataggcgtgagtcatcctgcccagcccagaatgggttctaatcccagcttggcaactcactaggaataggagtttgggaaggcagcatcccctaggagtcttgcttgccacatctgtgaaatgtgtataagtgtttcacaagagcctggagtccctgtggactggaggagacgctgctccggggaagctcagatccgtgcccggcacatagtaagtgctccataaactatctcaccgcactctggcttccacggacaaaggggtaaagccagccaggaaccagcttcctgctaggtacaaaagtcccccaactgggaagtcaggtgagaagacatacctacctcccagtgatcattgcctaaatctgtgcttctcctcacctcctttggagcctgagctcacctgggcagggggccaggtaggcaggcatcaaactcctggcctcgaccgattctcaagtcccacttaggactcaggcagcttcctcccgtcccctctgtccaccatgacttcctggaactggtttaagcaagggtggccatggcagatgtcaacaccctatgaaacccctgggggtcagtgacctgccttgccgctggctccagaaggggagctccaggccagacccagccatccagcaacttcagagcatgctaagactggacttccaaaattccaagggccccaggtcccactgccaggcctagccgggacaagaaccccaaagcagttaacggataggccttcctacttttaagccacctcgtcgccacgcccacccgagggaagtgggcaggctttgcccaagacctccccagaatcagttgggggcgccaggagctggggcaacccccacccccacccgtggcaaaaccatctgtaggggagggggctttgcggtggcggggggtgtctctgaaaaccccagaagggagggcggagattctgcccgcaggaggaaacttgcctgcaaatggcgtttccaaaagcaaactgttcaaaatttagagaaaacctggtgggcggggggcggtatttagcccacccccttcaatatcaccccttctacggggctctttcgcccctcaaaagtcccaggaagtgagaagagggtttcaaagtctgagcttcgttgcagaagttggatttttctggggggaggggtgaccagcctgggctgaagacccctccccaggccgcagagtccagcaaatcccaccccgagaaaggccctccccgacccctccggcccctggggtgccccaggactccatggacaccgccccccagctcaactgagacgcccccgccactcaccgcggtcaaccggacgtcccaggaacagctgccgcgacttcaaaaccagcttggaaaccgtccgggccgaggcgggggtggcttttactgcgtggtaggttgggggcgcactggagtgacgggcgaggggaccaatcaggttgagggattgcccgcgccaggcccgcccctctcctccctgccccgcctccactaggccccgcccctcgccaagtcatgaagtccgggaaggactccacgccctgcccctgaaggggagggagcactcttggaccacgcctgtcccagccacgggacccccgctccgcagctggggaccctgtgaagttggccctgggaggtgagtgcgatcgggggcgccgcacaggtgctgggattccccaggtcgcccatttcccctatggccaaactgaggctgcgagaaccctgggagagttgcagggtgaccctcgccagcgcgtcaggggccacgccctccaccatgggctccgactcagctatatgtacacacacacacacacacacacacacacactttttttttttttttgagacacagtctcgctctgtcgctaaggctggagtgcagtgacgcgaccttggctcactgcagcctccacctcctggattcaagcgattctcctgcctcagcctcctgagtagctgggattacagacacgtgccaccacgcccggctaattttttgtatttttagcagagacggggtttcaccatgttggtcttgaactcctgacctcaagtgatctgcccgcttgggcctcccaaattgctgggatcacaggtatgagccaccgcacccggcccaacccagctatatgagtgacttgaaccaccacgggaacttgtccagcctccggcctgatctgcccaacatcagaccacttcatcctcccagcactgtattgtctttttaatcatccctattttgcagagaaggaaactgaggcctggagagggtcagccaggggcaatggaggggtcaggctccaggctctgtgactgctggatcaaccttttcctgaagctgcccccacttggattttaccccgcccctctccacctcccaaattatttatcctcttggtctataaaccaaggtctcaatctcagatggtccagggaggaggtgaatatttctgctgaggaggtggcagtgatgccctgcttagaggggcaggggagagcagtgccctatgggagacccacctggagagtcacagatccacaggaagttcaagctgtagacatgtcctgcctgttagggaacaattggaccaaatgaaacccaactggggctttgtccagcccaggggccaccagtttgccacctctgccaaattatttgaatagaatgaagcttctggtagctttagaaagaacatgggaaaaattgggtgtctgtgactgcatttttttgggggggtgagtggggacagggtctatgctagcactgtccaatagaactttctgcaattctagaattgtgtgccatccaacattgtagccaaaagcaccacgtggctaatgcacagtgagaagctgaatgtttaaattttttttttttttttgaggcagagtctcgctctgtctcccaggctggagtgcaatggcgcgatctcgactcactacaacctccacctcccgggttcaagcggttctcctgcctcagcctcccaagtagctgggattacaggcgcgcgccaccacacccagctaatttttgtatttttagtagagacgaggactaaccatattggccaggctggtctcgaactcctggcctcaagtgatccacctgcctcggcctcctaaagtgctgggattacaggtgtgagctaccgcgcttggcctgaatgtttaaatttaagtaacttcaggcagctagtgagattctcaagtgaatctgagaccccattccatgacatttgtaacaggctttttccttctcattcactcattcaaccatatttattgagtccttgcgctggggacagcggtgagctaaacagataagaattccagccctggtgacacacactacccagtgggagagacgaacaaggaacaacataagtgagagaactttacaatgtgtcacgtggtaggacagcaaaggacgagatgaatgtgggggatgcggggattttgttcttgttttttgtcaaagagtctcactctgtcacccaggctggagtgcagtggcacgatctcggctcactgcaacctccgcctcccaggttcaagaaattcttgttcctcgacctcccaagtggctgggattacaggcctgtgccaccatgcctggccaatttttgtattttttttttttttagtagagacggggcttcaccatgttggccaggctggtctcgaactcctgacctcatgtgatccaccagccctggcctctcaaggtgctgggttataggcatgagccaccacacccggtggggccgcagtttttagtagggaggtcagaggaggcctttctgagtgacatccaagaagagaagagagagaggccaggagggaaccatgtccagttagggggaacagcattccaggcagcaggcacagtccgtgcaaaggccctgaggcaggaccacaccctgcctgttagaacagtgaggaggccccagtggctggagtacagtgagtgagagagagggaggaggggagggctgggatggctcagagaggggaagtgactcatccaagattcaaggtcagtgggagatttgcctgttaacccttaacttcttagtggccttgagtaacaaaatagctctggtctaggggatgagccctggtgattttgccccacaccgttttttgttgttttttttttttgagacagagtcatctcccaggcttttggttcttcttgatggcaacatctgcccaggagtccccgcctggcctcccacagccctagggtgagaggtaagaaatagctactgttggctgggcgcagtggctcacgcctataatcccagcactttgggaggccgaggtgggcggatcacctgaggtcgggagtttgagaccagcctgaccaacatggagaaaccccgtccctactaaaaatacaaaattagccaggtgcggtggcgcatgcctgtaatcccagctagtcaggaggctgaggcaggagaatcacttgaacctgggaggcagatgttgcagtgagccagattgtgccattgcactccagcctgggcaacaagagtgaaactctgtttcaaaaaaaaaaaaaaagaaaagaaaagaaaaaaagaaatagctactgttggccggtggctcacaccggtaatcccagcactttgggaagccaaggcggacagatcacttgagctcaggagttcaagaccagcctggccaatatggcaaaatcctgtctctaccaaaaatacaaaattaaccgggtatggtgacgcatgcctgtaatcccagcttctccacaggctgaggtggaaggatcgcttgagactggaggggtggaggttgcagtgagccaagattgcaccactgcactgcagcctgggtagcagagcaagaccctgtctcaaaaccaaaaatgagatagctgctgttttctgggctatttcattacattattcagcagcctgattcccattttcttttattatttatttatttatttattttcgagatggagttctgctctgtcgcccaggctagagtgtagccgtacgatctcggctcactgcaacctctgcctcccggtttccagcaattctctgcctcagcctcccaagtagctgggattacaggagcccaccaccacgcctggctaattttttgaatttttagtagagatggggtttcaccatgttggccaggctgatcttgaactcctgacctcgagatccacccgcctctgcctcccaaagtgttgggattacaggcgtgagccacagcacgtggcgctatttatttatttacttcttcttattattattatttgagtcggagtcttgctctgtcacccaggctggagtgcagtggcgcgatctcagcttactgaaagctccgcctcccgggttcacgccattctcctgcctcagcctcccgagtagctgggactacaggcgcgtgccaccacacccagctaatttttgtatttttagtagagatgaggtttctccatgttgaccaggctgctctcaaactcctgacctaaagtgatccgcccacctcagcctgccaaggtaaaccaactgtgatttctgttttctggatcaggaaactaaggatcagagaggcagagtaacttgccccaggtcacacagccagaaattgccagccccagggtttgaaccttgagttatgtgtctttaaggtctttggtttctgtttgttttggggtttttttgttttgttttgtttttgagagagtctcacttcgtctggaagtgaggctggagtgcagcggtgggatctcagctcactgcaacctccgctttccaggttcaagcaattctcctgcctcagcctcctgagtagctgggattacaggtatgcgccaccacacccggctaatttttgtatttttagtacagacagggttttgccatgtgggccaggctggtctcgaactcctgacctcaggtgatccacccacctctgcctcccaaagtgctgggattacaggcatgagccactgcgcccagcaggtctttgtttttgacattttctactctttctcttctttccttccctctgcatcccctcccaattctaggactcctaattctttctttttttttttttttttttttttttttttttttga[131 bp omitted]caccaagcccggctaattttttgtatttttagtagagacagggtttcaccatgttaaccaggatggtctcaatttcctgacctcctgatccacccgccttggcccctcaaagtgctcggattacaggtgtgagccaccgcgcccagccaggacgcctagttctttctcactgagaagaggggaacggcggtgagcatgctgccacaaggtggcactgctggtcccagatgggtccctgcctggcacaggtgttccctgtctctcctctgacccttccttccctccatccatccatccgtttttaagcatgtcctattgagtgtgagccaggccagcgattcactggatatgcagtcattcaacaaacaataattaagcacctgctgtgtgccaagcctgtgctgggcagccctggagacagacaca[131 bp omitted]agaaaccctgtctctattaaaaatacaaaattagccaggcatggtggcgcatgcctgtaatcccagctagttgggaggctgaggcaggagaatcgcttgaacccgggatggtgaggtgagaattgcttgaatcctctctgagccatccctgtcctcccctcctccctccctctcgctcactctttgcactccagcctgagcgacaaaaacgaaactctgtctcaaaaaaaaaaaaaaagacttttgcggccaggcacggtggctcagctctttgggaggttgaggccagaggatcactggaggccaggagttcgagaccagccaggccacatagcaagaccccgtctctgcacaaacttaaaaaatgtagccaggcatgatggtgcctgcctggggcatcggctacttcgaaggttgaggagggaggattgcttgagcccaagagttctagtctgcagtgagctgtgatagcaccactgcactccagtctgggcgacagagcaagaccctgactcaaaacaaaaaacaaacaaacaaaggcttttggggctgggcacagtggctcatgcctataattcccagaagattgggagtctgaggcagaagaattacttgaagccaggaggttctgttttgttttgttttcttttcttttgagatggagtgtgaccaggtggataaaatagagggttatcagggctgtgatagggtgcacaagtgtgatggagcctggggtaggtgctggacctaggtgggtgagagtagttctggaggactttcaggatgaggtgatgtctaagctgagccctgagaagtgaacagcgatcaggcaggtaaaggcaccaaaaagctgtttcaggccaagggaacagagagtgctaagacacagaataagactggagcgtagaatgtggtgggggtggcatcaggggaaaaaagatgaagctggacagagtggccagggtcaggctgccagatctaagggcactggggagccacagtaggttccagagcaggagcagcaagggcaagttggaacatttgaaagatctcttgggccaccctgtggataatgattcaaagggaataagactggaggatgaggaatgggaggaggaaaggaaccaaatgcttcaggtaactctggaagaaaaagtaggacatacgtggtggcaaggccagatatggtggctcacgcctgcaatcccagcactttgagaggcggaggtgggaggatcgcttgagcccaggagttcgagaccaacctgggcaacatagtgagaccctgtctctgttttgtttgttcgttttagagaaagaaaataaaaagaaaggtggtattggagagggaacagtacagaaggacgttccagtcacagtagcattcattcattcattcggggaatatttatttttatttttatttatttatttttttgagacggagtctcactctgtcacccatgctggagttggagtgcagtggtgcgatctcggctcactgcaagctccgcctcctgggttcacgccattctcctgcctcagcctccagagtagctgggactacaggcgcccaccaccatgcccagctaattttttttttttttttttaatagagacggggtttcaccgtgttagccaggatggtctcaatctcctgacctcatgatccgcccgccttggcctcccaaagtgctgggattacaggcatgatccaccacgcctggcctatttttattattattattatttattacttttttttttgagatggagtctcgctctgtcgcccaagctggagtgcagtggcgcgatctcagctcactgcaacctccgcctcccgggttcaagggattctcctgcctc[212 bp omitted]aagtctagctctgtcacccaggctggagtacaatggcacgatcttgggtcactgtagcccccgcctcctgggttcaagggattctcctgcctcggcctgctgagcagctggcgttacaggtgcatgtgaccatgcccggctaatttttatattttaaattttttttaagttttgtttatttatttatttgagattgagtctcattccatcacctgagctggagtgcagtggcgctatctcagctcactgcaaccttcacctcctggtttcaaacgattctcctgcctt[134 bp omitted]cggcctcccacagtgctgggattacaggcatgagccaccgcgcctggccagggcctggtctttatcttgggagcaatgggcagcaatgttggattcagagcaggggagggccctcatcaggcctctggggaagggaaggggcctgtgagatgcagggactggcaggggcctgggggctctgggagggccagtgggaggtgacggtccgcagagggtctgcagggggtgcgggcagaggagagagagactgtagacggaaagtggacaggtgaggctgacacaggcctcgggttgggggttccgggggcagggccaaccttgaggcagggacccagcagagaagcacgttgggggatatggatgaggatgagctcagcttgcctcttccagaacccctggcgtaaggttgcagggttagcaaataaaaatacaggacacctggttaaatgca[180 bp omitted]t[131 bp omitted]cactgcgcccggcctttgtttttcttttgagacagggtcttgctctgctgctcaggctggagtgcagtggtacaatcagggctcactgcagcctcgacatcctggacctaagcgatcctcttacctcagcctcccaagtagctgggagtacaggtgcatgccaccacatcgggctaatttttgtatttttcatacaggtgggggtcccaccatgttgcccaggctggtcttaaactcctgggctcaagtaatcctcccaccttggcctcccaaagtgctgggattactagtgtgagccaccacgcctggccatgtgaataatttttagcgtaagtatgttccaaattattttgagacatacttatgctaaacatttttcatttaatggagttcagtggctcacgcctataatcccggtgctttcggagacagaggcaggaagattgcttgagcccaggaggtcagggctgccgtgaactatgatggcaccactgtactccagcctgggtgacagagcaagaccttgtctcaaaataataataataataataataattcattttggccgggcacagtggctcacacctgtaatctcagcattttgggaggctg[134 bp omitted]gaggcaggagaatcccttgaacctgggaggcagaggttcctgtcagccaagatcgcaccaccgcactccagcctgggtgacagagggagaatctgtctcaaaaaataataataatggccgggtgcgacggctcacacctgtcatcccagtactttgggaggccgaggg[135 bp omitted]gaggcaggagactcacttgaacccaggaggcggaggttgcagtgagccaagatcacgccattgcactccatcctgggcaacaaaagcaaaactccgtctcaaaataaaaacaaaaacaaatactaataataacaacaacaataattcgtttaactgcctgtcttgtaattaacctggcaactcagccagacgttgtccacgttgccccccgccacattgtggctccagcgaccgggtggacacctgaccagctgtggcccaacggtgagaaggcagaggattttgtctggcaattatttgggctcgctgcaggaagccaggggtcttttaacatgcaggccctggcctgtccccacccccaggccctcatggcgccagctgcccgctgccccctgcaaggcgctggcgggcgtgggggaggggagcagctctgagacccactgtcccctctcctaggccaggagtgtcctactggctcgcatgcccatccgtggaatgcccgaggggaccccgggccaggcctccacctggccattgtctcctgcaccctccgtccctggtggcccgtccggctctgagccagacatttacgacttcttgggcctcccacaagtcctgcaggcaggcagattccttgtccatgtccgggaaggatggaggcctggggcagctgcctgggaatccgatcccacgggcccctgcaactccattccttggggccgcagccacccccacagccaatccctccctggagaaccgtgtccaggatggccaggcctggcggctctgggcacggccctcccagtgccagctgccaggatgtgccagccgcattggcggggagagaacaggccgttcttggctctcccggctgcctctttgttccctgggcggaggtggggggctgttgtcctggcaaccacccccttttccccaacacagtcacacgaggtgaaaactgggggcgcctcaggcctgggggttcaggtcagggagggtccccggtcacctaaggtggccgaggatctccctcctccccgccagcccggcttccttggagttcatatttcccggacgacgagggaggccgggtcaccccccgcacttttggggattggaatgtcggaggtggtggcaacagggggtggacgttcccagcggggcaggcaccgtggtggtggcagctgctagtcccctgcctgtcccacgtcccccaagtgggaggccgcagctggtgtgggtgactttggttcccggggcgggggagggttattttgggagtagggaccagggagaatgagaggcccctccacgggggcaggaagtggggcggccccagctgcattctcccgttggcccacctggcgtggcgggtactgctgccgctgcacaggaagtgtccccaacgcccgcctgtgtggtccactgagtctagggcctggaaatgggaggcagctggcaaggagggggcagggacccgctgggggtgctgtacagcagatcagaatcttccagaagagtcccgctggggtaatggtggtgcctatggagtgagtggtgactttggttcaggccatttatatgcattggctggtttaatccagtgtgttccggaggaagatgctaggaataaatcccccttttacacatggggaaactgaggctcagaaacagaagcgactggcccaaagtcattcagcaaataaacagccgaggccaggcgcggtggctcagacgcctgtaatcccagcacttcaggaggccaaggcgggtgaatcacctgaggtcaggagtgtgagaccagcctggaccacacggtgaaaccctgtctctactaaaaatataaaaatcagccaggtgtggtggcgggtgcctgtaatcccagcacttcaggaggctgaggccggtgaatcacctgaggtcaggggtgtgagaccagcctggacaacacggtgaaaccatgtatctactaaaaatacaaaaatcagccaggtgtggtggcgggtgcctgtaatcccagctacttgggaggccgaggcatgagaattgcttgaacccagggcaggggtggaggttgcggtgagccaagatggcgccactgcattccagccttggcaagacagcaagactctgtcccaaaacaacaacaataacaacaacaacaccaacaacaaaacagcagaggccgggcgccatggctcatgcttataatcccagcactttgggaagctgaggtgggcagatcgtttgagcccaggagcttgaggttgcagtgagctatgatcgcgccactgcactccagcctgagactggagcgtgactccaactcaaaacaaaataataataataataataattaataaacatcagaagtgggattctcatgcatagcatttactatcagatatattaactccacagaggcctccaagtatatactgtacagtgtagctctcaaccaggggtgagtctgtccttcagggcccatggggtgatgtctggggacatttgtggttgtcatgactgggggttgctcctgatatggagggggtgggggccggggatgctgctcagcactcttcagtaccc[145 bp omitted]gaaaccctgtctctactaaaaatataaaaattagccagccgtggtggcacgcgcctgtaatcccagccactcaggagaccgagccaggagaatcgcttgaacctgggagatggaggttgcagtgagccgagatcacacaactgcactccacccttgtcgacagagtgagactctgtctcaaaaatacatacatactatacatacatacatacatacatacatacatacatacatacatacatttcccatcctggggtcgttcatatcagcctaactgtcagagtttaggcaagcagtgagtattcacagtggttcacatcaccggtttggttgaactggttttgagtcctggctctgcagtgagtttgctgtgtgaccttgggcaaatcaatgaacctctctgatcctcagttcctgggcattggtagtggtatcttcctcagggttgctgtctggactacatgagatgatgcaggtaactggcttaagacagtgtcatgctcaaagtgagggcccaagaaatgtgacctagatcactattgttactattcaagccacaaacatttcttcctttttttttttttgagacagagtctcgctttgttgcccaagccggagtgcagaacctctgcctcctgggttcaagccattctcctgcctcagcctcccaagtagctgggattacagacatgtaccaccacacctggctaatttttgtttttgtttttgtttttcaatgtttccagtttctttttttttttattattatactttaaattctagggtacatgtgcacaacgtgcaggtttgttacatatgtatacatgtgccatgttggtgtgctgcacccattaactcgtcatttacattaggtatacctcctaatgctatccctcccccctcccctcaccccacgacaggcccgggtgtgtgatgttcctcttcctgtgtccacgtgttctcattgttcaattcccacctataatttttgtatttttagtagaaacggggtttcaccatgtt[134 bp omitted]ctcacacctgtaatcccagcactttgggaggccaagatgggagcatcacttgaggtcaggagttcaaaaccagcctggacaacacagtgagacccccatctctatttgaaaaaaataaaataaaaaataaaataaaattacatttgtggctctcatgatcactagcattggcttagaggaagaaatagacatgaattgactgaatgtggtggctcttgtctgtaatcacaacagtttgggaggctgaggcaggaggattgcttgatcccatgagttcaagactagcctgggcaacatcgaaagaccacatctctacaagaaacttttctttttttttttgagatggagtctcgctctgtcacccaggctggcatgcagtggcacgatgtcggctcactgcaacctccgcctcccaggttcaagcaattctcctgcctcagcctcccgagtagctgggactacaggtacccaccaccatgcccggctaattttttgtatttttaggagagacgggatttcaccatattggcca[133 bp omitted]tacgcctgtaatcccagcactttgggaggcagaggcggagggattatgaggtcaggagttcgagaccagcctggccaatatggtgaaaccccgtctctacaaaagatacaaaaattagccaggcgtggtggtgggtgcctgtaatcccagctactcaggaggctgaggcaggagaatcacttgaactggggaggcagaggttgcagtgagccaagagcgagccactgcattccaccctgggtgacagagcgagactctgtctcaaaacaaaaaaaaagagagagagagagacatgaatccggtggggcgcaatggcttatgcctgtaatcacagcactttgggaggccgaggtgagcagatcacttgaagtcagaaggttgagaccagcctggccaacatggcgaaaccctgtctctactgaaaatacaaaaattaggcgggcatggtggcatccacctgtaatcccagctactcagaagactgaggcaggagaatcacttgaacccgggaggcggaggttgcagtgagccgagattgcggcactgcactctagcctgggtaacagagcgaaactccatctcaaaaaaaaacaaaaatgcaattgtggctggcggcagtggctcacacctgtaatcccagcactttgggaggctgaagcgggcggatcacttgaggtcaggagtttgagaccagcctggctaatgtggtgaaacgccgtctctaccaaaaaatacaaaaattagccaggcaaggtggcttgcacctgtaatcctagctactagctactagggaggctgaggtgtgaggactggattgcttgaacctggggggcggaggttacagtgagccaagatcgtgccactctactccagcctggtcaacagagtgagaccctgtctcaaaaaaaaaaaaaaaggcaattgttattaaacttcgagatcttgaaaaaagaaaaaagaacaaaatgcaattgtcattacagcagtctgttttctttttgttttctttatctttttttttttttgagacggagtctcactctgttgcccaggctggagggcagtggtgtgatctcagctcactgcaagctccgcctcccgggttcactccattctcctgcctc[131 bp omitted]ccttggcctcccaaagtgccgagattacaggcatgagccaccgcgcccggccagcagtcttttttttctgtttctttcttttttttttttttttttttgagacggagtctcgctttgttgcccaggctggagtgcagtggcgtgatctcggctcaccgcaagctcc[135 bp omitted]gcctcccaaagtgctgagattacaggtgtgagccaccgcacctggcccagcagtctcttttttcaaaatccctctgtgggtgtcacctggccccaggcttgcttcagcgacactagtctactttcagttccatgctcctgtcatgttcccttatatgccaggcctttgcacaggctgttccctctgcctggcacactcttccctgttttctgcctagccaactgtgcgaatccttcagatctcatttcaagcactgcttccttaggaaagctttcgtggagctccgataacgagccgctatgcatctgtccaatggggaacgtggcagagaagccttttgacactttattggtagaatttgtcgattcatgtctatttctttttttttgagacggagtttcactcttgttgcccaggctggagtgcagtgacacgatcttggctcactgcaatctccgcttcccgggttcaagcgattctcctgcctcagcctcccgagtagctgggattacagggcctgccacgacgccctgctaattttttgtatttttagtaggcacggggtttcaccatgttggccagactggtctccaactcctgacctcaggtgatccgctggtctcagcctcccaaagtgctgagattacaggcgtgagccaccgcccccggcatttttttttcttttttttttttgagacagtctctgtcaccctgactggagtgcagtggtgtgatttcagctcactgcaacctttggctactgggtttaagggattctcgtgcctcagcctcctgagtagctgggattacaggcacctgccaccacgcccagctaatttttgcatttttagtagagatggggtttcaccatgttggcgaggctggtctcacactcctgacctcaagtgatccgatcgcttcggcctcccaaagtgctgggcaacagatcgagatcctgtctgcaagaaaacagtacaacacaaaaaaactaagtgtcttggctgggtgcggtggctcacacctgtaatcccagcactctgggaggccgaggcctgcagaccatgtgaggtcgggagtttgagaccagcctgaccaacatggagaaaccccgtttctactaaaaatacaaaattagcctggtgtggtggtgcatgcctgtaatcccagctactcgcaaggctgaggcaggagaattgcttgaacccaggaggcagaggttctggtgagccgagatcatgccattgcactccaacctgggcaacaagagtgaaactccttctcaaaaacaaaaacaaaaaagactaggcgtggtggctcatgcctgtaatcccaacactttgggaggctaaggcaggtggatcacaaggtcaggagattgggaccatcctggccaacatggtgaaaccctgtctctactgaaaatacaaaaattagctgggtgtggtggcaggtgcctgtgatcccaactactagggaggctgaggtaggagaatcgcttgaacccgggaggcggaggttgcagtgagtcgagattttactactgcactccagcctggcaacacagcaagactctgtcttaaataaataaatcaataaagtgtcttagttggtcccaccctatggagaggctgggttttccggaatctgctggaatgtggcaggggccactaaatgcaaatgtgtcatggctgcagggttgacagacaccctgcagcaagagggagggaggtaccagtatgttgcagttcgaaggtggctggagaagtatttcagggccattcccccaagaagacaaaccctggaccagtctttttaaaatttaatttaatttaat[211 bp omitted]gaggcaggagaatcgcttgaacccgggaggcggaggttgcagtgagccgacattgcactactgcactccagcctggcaacacagcaagactctgtcttaaataaataaatcaataaagtgtcttagttggtcccaccctatggagaggctgggttttccggaatctgctggaatgtggcaggggtcactaaatgcaaatgtgtcatggctgcagggttgacagacaccctgcagcaagagggagggaggtaccagtatgttgcagttcgaaggtggctggagaagtatttcagggccattcccccaagaagacaaaccctggatcagtctttttaaaatttaatttaatt[214 bp omitted]gaggcaggagaatggtgtgaaaccgggaggcggagcttgcagtgagccgagatcccgccactgcactccagcctgtacgacagagcaagactccgtctcaaaaaaaaaagacaaagaaaaattaaaaactagacacagggtctccctatgttggccaggctggtctcaaactcctaacctcaaagacatctgcccaccttggcctcccaaagtgctgggattacagacacgagccacagcgcccagcctcagccgctgtttcatttcagccatgcagggccttgcaggcaaagccaggccttttggattttacttcaaatgctgtagggacctgatggagattttcagtgagggaacaggatggcctttttcatgctgagagttcttttgttgctccaggaatacaattgacaggtaaaattcaggatgcccaattaaatcagaattgcagataaacaatacattttttttgagacagagttttgtgcactgtctctctctctctctctctctctctctctctctctctctatatatatatatatttttttttttttttgagacagagttttgctcttgtcatctaggctggagtgcagtggtgcgaccttggctcactgcaatctccgcctcccgggttcaagcaattctcctgcctcagcctcccgagtagctgggattacaggcgcccgccaccatgccctgataattttttgtatttttagtaggcatggtgtttcaccatgttggccagactggtctccaactcctgacctcaggtgatccactcgtctcagcctcccaaagtgctgggactacaggcgtgagccaccgcccccggcatttttttttttttttaagacagagtctcactctattgcccaagctggagtgcagtggcgtgatctcagctcactgcaaccttcacctcccgagttcaagcgattctcctgcctcagcctcctgagtagctgggattacaggcatacgccaccacgcccagctaatttttgtatttttagtagagacagggtttcgccatgttggccaggctggtctcacactcctgacctcaagtgatccgcccacctcggcctcccaaagtgctgggcggcagatcgagatcctgtt[133 bp omitted]cctgaccaacatggagaaaccccatttctactaaaagtacaaaattagctaggtgtggtggcacatgcctttaataccagctacttgggaggctgaggcagcagaattgcttcaactgaggaggcggaggttgtggtgagccgagatcacgccattgcactccagcctgggcaacaagagcgaaattccatctcaaaaaaaaaaaaaaaaaaggtccgggcgcagtcgctcgtgcctgtaatcccagcactttgggagcctgaggcaggcagatcacgaggtcaggagattgagaccatcctggccaacatggtgaaaccctgtctctactgaaaatacaaaaattagctgggtgtggtggcaggtgcctgtgatcccaactactagggaggctgaggcaggagaatcgcttgaacccgggaggcggaggttgcagtgagccgagattttactactgcactccagcctggcaacacagcaagactctgtcttaaataaataaatcaacaacgtgtcttagttggtcccaccctatggagaggctgggttttccggaatctgctggaatgtggcaggggccactaaatgcaaatgtgtcatggctgcagggttgacagacaccctgcagcaagggggagggaggtaccagtatgttgcagttccaaggtggctggagaagtatttcagggccattcccccaagaagacaaaccctggatcagtctttttaaaatttaatttaatttaat[150 bp omitted]aaatacaaaaaaaattagccaggcgtggtggcaggcgcctgtagtcccaactactcaggaggctgaggcaggagaatgtcatgaacccgggagacagagcttgcattgagccaagattgcgccactgcactctagcctgggcgacagagtgagactccgtctcaaaaaaaaaaaaaagaaaaaagaaagaaaaattaaaaaatagacacagggtctccctatgttggccaggctggtctcaaactcctaacctcaagacatctgcccatcttggcctcccaaagtgctgggattacaggcacaagccgccgtgcccagcctcagccgctgtttcctttcagccatgcagggccttgcaggcgaagccaggacttttggattttacttcaaatgctgtagggacctgatggaggaacgggatggcctgtttggtgttgagagtcctcttgttgctccaggaatacaattgccagggaaaatccaggatgcccaattaaatcagaattgcagataaacaatacattttttttgagatggagttttgcatgctttctctctctctccctatatatgtatacatatatatttttttgagacggagttttcttcttgtcacctaggctggagtgcagtggtgcgatcttggctcactgcaacctctgcctaccaggttcaagcgattctcctgccttagcctcccgagtagctgggattacaggtgcccgccaccatgcccggctaatttttgtattttttgtagagatgggttttctccatgttggccaggaaggtctcgacctcctgacctcaagtgatctacctgcctcagcctcccgaagtgctgggattacagatgtgagccactgcgcctggccatcaatgaatgatttttaagcataagtatatcccaaatattgcatgggatatacttatactaaatatttctatctttcctctaaaatccaatttaggtcgggcacggtgtcccaggaggctgaggcaggagaatcgcttgaatccaggaggtggaggctgcagtgagccaagatcaaaccactgcactccagcctgggagacagagggagactccgtctcagaaacaacacaaaaccaaaaaaggtggacagagaagggtagaggcaggggacggggagaagtgggagattctgggcagtgtggagaccgagcccctctggcttattgatggattgcacatgggcagatggcacaggctcatcactaggaagactttggcattgatcctaagtgcgggggaggaagccgaagctgctgtaagcagaggagacacaggatctgactcaggtatgagacccacaaagcagccctggggctcaatagcaacctctgtgaattacaccagcacacagtttctccccctgtgtactgtgatattgtgggtggcttttttttttatttttatttttttgagacagtgtcttgctctatcacccaggccggagtgcagtagcacgatcatggctcacttcagcctcgatctcccagactcaagtgatcctccagcctcagcctccctaatagctgggactaaaggtgtttgctgctacagccagctaatttttcatatatatatatatacatatatatatttagactgactcttgcactgtcacccaggctggagtgcagtgaggtgatctcagctcactgcaacctcagcctcccaggttcaagagattctcctgcctcagactcccgagtagctgggattacaggtgcacaccatcacgcctggataatttttctttttttttttttttttgagacggagtcttgcactatcacccagtctggagtgcagtggcacgatctcggttcactgcaagctccacctcccaggttcgcgccattctcctgcctcagcctcccaagtagctgggactacaggcatccaccaccatgcctggctaattttgttttcgtatttttagtagagatggggtttcaccgtgttagccaggatggtcttgcctgacctcgtgatccgcctgccttggccccccaaagtgctgggctgggtgtgagtcaccgtgcccggccagtttttctttttctcttttttttttttttgtagagatgggggtctcacagtgttgcccaggcttgtctcaaactcctggtctcaagtgatcctccagccatggcctcctaaagtcctgggattacaggaatgagccaccatgctcagcccccttggtactgttgacattcaggataaacaattcctgattgtgggggccgtcctggacactgcagggtgctgaacagcgtccctggcctccaccctctccacgccaataagactcttctcccccgatcccctgcagttgtgacagccaatacaaccagacattagcagaggggagaattctccccaagtaggacccctggtcttggcactgtgagaccccagtaggctggggcagactcagggtggaaaaggcaggttatgccgggtttgggtcctgggagaccttcccggtttcctttgtccattccaggcattcagtgatagttctagggaggggagacacagatacctaaaccgctagagcttggggaggttgcagacaacctgttgcccactcctcgactcctctgagagtcacctgtgcaagagagagggcttcctcctggtagagactaataaagcttttaatatttaaaagttcgggcacttaattctggtgatctgggttcacgggtaacactccgtcctctgacagctggcagatggcagagtccactgaggcgctggtgatgatgatgggaactttggccttgaggctggtcagggaccagggcaggtgcacggtggtgaccagctcgtagcgagtgtgcatgatctcaccgtcctgcgtgctgctgctcacggacagcagcaacggcaggttgaaggtgctgacaaccttggtggtgttgaagcgggtcacgggggtgttggcctcctgcctcagaagctcgctgctgtccagccgagaccgccgctctgcactgggcgtgaagccctcgtactgtatgtgggcatacagggcgaatacgaccgtcttgatgcatttgctggtctggttgttgatctctgttgtgaagacgaccttctctcctggcgtgaaggtgttcctttccatctggatttgcaaacagacagtgccctggcggcagcagttgtaggagactttctcctcagcctccacgaacaaggggttctaggaggatgtgggggaacagacaaccgtgagggaccaggaccacaaaatccacttgcctgcctgatccaccctgggaactcctcaaagtctgtggggctggctgggcacgatagctcacgcctataatcccaacaccttgggaggccgaggcgggaggatcaccatgtcaggagttcgagaccagcctggccaacatggcgaaactccatctatactaaaaatacaaaaattagctgagcgtgatggagcatccctgtaatcccagctactcaggaggctgaggcaggagaatctcttgaacccgggaggtggaggttgcagtgagccgagattgtgtgattgcacttcagccagggctacagagcaaaactccgtctcaaaaaaaaaaaaaagtctctggggctttgggggctctcctaggaagaggcattaagatggaatctggaagcctagggattttgcagtcaaaaacctggagtcatctcccatctcccagcatgttttgttttttgttttttgtatttttttggagacagagtcttgctctgttgcccaggctggagtggagtggcgtgatctcggctcagtgcaacctccgcctcccgggttcaagcgattcttctgcctcagcctcctgagtagctgggattacaggcgcacgccaccacacccagctaattttttgtgtatttttagtagagacagggtttcactatgttggccagacttgtcttgaactcctgaccttgtgatccgcctgcctcggcctaccaaagtgctgggattacaggcatgagccactgcatccagcattttttttttttttaatgcagcctggagtgcagtggtgcactcatggctcactgcagacttgacctcctggactcaagtgatcctcctccatcagcctcccaagtagcagggaccacaggcatgtgtgccaccacaccccagctttttttttttgaaagaaggtctcactatgttgtccaggctagtctcaaactcctgggctcaagcagtcctcccacctcagcctcccaaagtgctgggattacaggcatgagccactgtgcccagcctgcttttatttttaaaaagttgtttgcaacatagcaaattgttatttctgatatttttattctacttgttgcctgttctgttcttttatcttaatataaaaaagtggttgcaacctgctaaattgattttttgtgatattgcctatttagattcttgcctattctttcattttataaaaatatggccaggcgctcccagcatttcaggagg[134 bp omitted]gaggcgggagaattgctggaatctgggaggtggaggttgaagttagctgagatcgcgccactgcactccagtctggcgaaagagcaagactccgtctcaaaaataaatatatatattataataatataatatatattatattattagaatatatataatatattattatatataatatattataataatataacatattatatatatattatatatatatagccaggcgcagtggctcacacctgtaatcccagcactttggggggccgaggcaggaggatcacctgaggtcaggaatttgagaccagcctggccagcgtggtgaaaccccatctctactaaaaatacaaaagttggccgggtgtgatggcacgcaactgtaatcccagctactcaggaggctgaggcaggagaatcacttgaacctgggagactgaggttgcagtgaggctgagatccagccctgcactccagcctgagcaacagagtgagactctgtctcaaaaaaaaaaagaaaagaaaagaaaagaaaatgcttgtattccaccaaatggatttttgcaacccacgactgggttgtgacctgtgatttgaaaaacattgctggctgggcatggtggctcatgcctgtaatcccagcactttggggaggccaaggggggaggatcactggagcccagaagttcaagaccagcctgggcaacatagtgagaccctgtctccaaaaa[131 bp omitted]aaaccccatctctactaaaaatacaaaaaaaaaaaaatagccaggcgtggtggtgggcacctgtagtcccagctacttgggaggctgaggcaggagaatggcgtgaacccaggaggcagaggttacagtgagccgagatagcgccactacactccagcctgggcgacagagcaagactctgcctaaa[362 bp omitted]gaggc[138 bp omitted]gtgcctgtagtcccagctactcgggaggctgaggcaggagaatggcatgaacctgggaggcagagcttgcagtgagccgagatcgcgccactgccctccagcctgggcgacagaatgagactgtctcaaaaaaaaaaaaaagaagaagaaggagaaggagaaggagaagaagaagaagaggaagaggaagaggaagaggaagaagaagaagaagaagaaaatcatactgcaggaagtcaggtatgtttcctttttgagaactcaggcagacccttgaccccctctgacctcacctcccacttttctgcctctggcttctcttcagccttttcaggagcagctggagctccccctcctctcctgaaggttaattgaatctggttacattgtaaatccctgcagtcttattcgaaaattcgtagcatgcgttaggaccctgcaggtgtgaaagaacctgctgccctaactccagacaaagctggtatttctgtcctggtcctgaaggaggtatcaggaggtgccaagagctaccaatgtcccttatttccaaatgagctattacattttttttttaatagcggtaccggctaggagcggtggctaacgcctgtaatcccagcactttgggaggcctaggcaggcggatcacctgaagtcaggagtttaagaccagcctggccaacatgtggaaactccgtctttactaaaaaatacaaaaattagctgggcgtggtggtgggtacttctcatcccagctactcgggaggatgaggcaggagagtcacttgaagctgggaggcagaggttgtattgagccaagattgcgccactgcactcccgcctgggtgacaaagtgagactccgtctcaaaaaaaaaaaaaaaaaaaaaaaaagaaagaaagaaaaaggaaaaaaaatgccagccctctgacatttgtcgtcctgtcccaatgctctgatgacaaatgactccctggagatgtgaagtgactttggccaacgtccctcctcccacctcgacttccgcctctgcacctggactcgggaagggatccagaacgagtccttcactcagccaagcggaggctgcactgcccgtccttctcctggactgaggccaccacctctattgtctgggagctccaaggtcagtgctggagggccactgagtgtacatgcctctctcccaccctgagggtcaccctgtggggccttttcttggcttttccccagggtcgtgtctccctcttgacaagtggacatttgggccattctcctgggtggggccgtcctgggcactgcagggtgctgagcagcgcccctggcctccacccactccatgccaggagcaccccccaagttgagacaaccacagatgtctccagacattgccaaatgtcccttatggggataaaacagccacagttgaaaaccactg[138 bp omitted]atggcgaaaccctgtctctactaaaaatacaaaaattagctgggcatggtggtgcacatctgtaatcccagttactcaggaggctgaggcaggagaatcgcttgaacctgggaggcggaggttacagtgagccgagatcatgcctctgcacttcagcctggtgacagagcgagactgcatctcaaaaaaaaaaaaaaaaatatatatatatatatatatttttttttttttacacacacacacacacacacacacacacacacacacacacacacatatatataattttattttagagacagggtctcactctgtcgcccaggctggagtgcagtggtgcaaacatggcttactgcagccttgacctccagctgccctaaggtttctgactcaccttttgtgaaatctcggggcctgggaagctgccaacacccttcccttctccccatgggaccttctctgtcccctgcctgcccaccttccctcttcctccttggagcttggagattgttcccacctccacctttcccccatcggtacctggaatggggtttctttgtggaaggtggaagttccttgaaccaataagtacatcctcttcttggctaaaatgtgttccctgcccatgcaggaagcttgtacgaaatagaagacatggccaaatttgctggtgaaggtagaaggaagcctgggaggtaagttgaaatggaagtcaaaggtgtggctgcctgcacttaaccaattatctgaaagcaaaacacaccgatgccatcagaaggttctagaatcttttttccttcttcttctttttttttttgctttatttttatatttatttatttttgagacacggtctcactctgtcacccagtctggagtatagtggtgtgatctcagctcacagcaacctctgcctcctaggttcaagcgattctcctgcctcagcctcctgagtagctgcgactacaggcgtgcaccaccacacctggctaatttttatatttttgacagagatggggttctgtcatgttgtccatcctggtcttgaactcctggcctccggcgatccgcccgtcttgccctcccaaagtgctggggttacaggcgtgagccactgcacctggcctttttttgcttgatttattgttttggcatggaggtgggtcctgggcttggcttgtctgtccctcctgagttaaactgagctctatgcttttaggacctgctgggcctataaatatcaggtcgcagctgggctggagtgggatgccctggggtgggtgacatgcctggagttgtcacccgaaaccactgaagggctcttgcatatccctgccctgagcctgagaaagtggaagtcaggccttcagggttcaacaaatatatctttttttttctttttgtagggacaaagtctggctctgttgcttaggctgcagtgcagtggtgtgatcatggtcactgcagcctccaactcctgagatcaagtgattctcccacctcagcctccagaagagctgggactacaggcccatgccaccatgcctggctaatttttaaatttctggtagagacagggtcttgctatgtttcccaggctggtcttgaacttctggccacaagcagtcctcctgcctcactctcccaaaagtgctgggataataggcacaaactggctgggcccagtggctcacgcctgcaatcccagcactttgggaggccaaggcgggcggatcacctgaggtcaggagtttgagaccaagctggccaaaatggcgaaacccaatctctactaaaaatacaaaaattagccgggtgtggtggcacacacctgtagttccaggtactcaggaggctgaggtgggaggatagcttgaacgtgcgagacggaggttgcagtgagccgagatcatgccactgtactccagcctgggtgacagagcgagacgccatctctaaaaataaataaataaataaacaaagtagtatgtgaggcagagaaaactttcgccctcatagagcttgaccttcagtgcatggtatacagtgggtgcttaatacatattgattgaccaactgagtgatggtctaggaagcagactctcacacaactgccatttccatgacctttgtttcattttccttcttgcacttctcgaaaatcctcttagcattttctatcttctctggcccatggcaatcccaaagatactagggaccctgtctctttctttcttttttgtttttttgagacagaatctcactctgtcacccaggctggagtgcagtggcgtgatcctggctcactgcaacctccgcctcctaggttcaagcaattctcctgcctcagcctcctgagtagctggaattacaggtgtgtaccaccatgcctggctaatttttgtatttttagtagagatggggtttcaccatgttggccaggctggtctcgaactcctgacctcagataatccacctgccttggcctcccaaagggctgggattacaggcataagccatcaggcgggcttggcctttttttttttttttgagacagggtctcactttgtcactcagcctggacctcttgggctcaagtgatcctcttgcctcagcgccccaagtagctgggactacaggcgcgtgtcaccacacctggctaatttttgtatttttcatagagatggggttttgccatgttggtcaggctggtcttgaacttgtgacctcaggagatctgcccacccagcctcccaaagtgctgggactacaggcgtgagccaccgtgcccggcccaggctgtgtttttttcatcactgctgcatccccagcacctagcacggtgtttgtgcacagtaggcactcaataaatgtttattaaataaatgaaaaacctggaacaggc[134 bp omitted]ggcgtggtggcgggtgcctgtagtcccagctactcgggaggc[136 bp omitted]ggatgggcatggtggctcatgcctgtaatcccagcactttgggaggctgaggtggggcagatcacctgaggtcaaaagtttgagaccagcctggccaacatggtgaaaccctgtgtctactaaaaatacaaaaaattagtagggcatagtggcatgcgcctgtaatcccagctatgcaggaggctggggcaggagaattgcttgaacccaggaggtggaggttgcagtgagctgagatcacgccatggcactccagcctgggtgccagagtaaagactgtctcttaaaaaaagaactagcggccgggcgcggtggctcacgcctgtaatcccagcactctgggaggccgaggcgggtggatcatgaggtcaggagatcgagaccatcctgg[135 bp omitted]gcttgcagtgagccaagattgcaccactgcactccacgctgggcgacagaggagactccgtctccaaaaaagtaaataaataaaagaaaagaaaacaactagcaacattttttttttctgagactgaatctcactctgttgcccaggctggagtgcagtggtgcaatcttggctcactgcaacctccgtctcccttggcctcccaaagtgccgagattacaggcatgagccaccgcgcccggccagcagtcttttttttctgtttctttcttttttttttttttttttttttgagacggagtctcgctttgttgcccaggctggagtgcagtggcgtgatctcggctcaccgcaagctcc[135 bp omitted]tggcctcccaaagtgctgggataacacgtgtgagccactgtgcctggccagaaatagcaatttttaagcatttactgtatacctggcattattctaagcgctttatgtgccattaaatcattaagtccttaacacaatcttatgaaataggacctcttcctactcccattttatagattggttaactgagagccagagaggtcacataattgctcagtattagtgtctggtaagttgacatttgtccccaggatatttgcatggctggagtccctcctatcactcagttctgtgcttggttgttccctctttgcagagtactcctctggtggaacagaccatctcatctaaatttttaaagtctaaaatggccaggtgtggtggctcatgcctgtaatcccagcactttgggaggccaaggtgggcggatcacctgaggtcgggagttcaagaccagcctgaccaacatggagaaactccgtctctactaaaaatacaaaattagctgggagtggtggcacacgcctgtagtgccagctactcgggaggctgaggcgggacaatcggttgaacccaggaggtggaggttgcagtgagccaagattacgccactgcactccagcctgggcaacgagtgagattcagtctcaaaaaaaaaaaaaattgctagttctttttttaagagacagtcgtttgaacccaggaggttgcggtgagccgagattgcgccattgcactccagcctgggcagcaagagcaaaactccgtctcaaaaaaacgaaaacaaaaaataaacaaaaattagccaagcatggtgccatgtgcctgtggtctcagctactcaggaggctgaggtgagaggatcgcttatgccagagaggctggggctgcagtgagttttgatcacaccactggcctctagcctgggcaacagagcgaggccctgtctcaaaaataaatacataagccaggcctggtggctcatgcctgtaatcccagtactttgggaggccgaggtgggcgaatcacgaggtcaggagttcgagaccagcctggccaacgtggtgaaaccctgcctctactaaaaataccaaaaattgctgggcatggtggcgggtgcctgtaatcccagccactcaggaggctgaggcaggagaatcgtttgaacccgggaggcggagcttgcagcgagccgagatggtgccacttcactccagcctgggaagcagggcgagactgtgtctcaaaaaatagataaataaataaataagatacaaataaataaatacagaaataaattaaattaaattacactttgttcagccaagtgttggccacgtgttctgcttgactgcttaatacctgggaatatccccacaaacacattttgcaatggacatataatttccccgacaactcagcagactctctgacatttgttcagatttcagatctgacctggtggaactggggactagttattccttctctggaaggtctcccttgctcttctacctccactatctttctttttttgagagggaatctcgctccgtcacccaggctggcgtgctgtggtgcgatctcagcttactggaacctccccttcacgagttcaagtgattctcttgcttcagcctcccaagtagctgagattacaggcacgtgccagcacgcccagctaattttttggtattttttggtagagatggggtttcgctatattggccaggctggtctcaaactcctgacctcaagtgatccacctgcctcggcctctcaaagtgctggaattacaggtatgaaccactgtgcctggcccacctccactgtctctccccatgaatgcaggactgcctactttgtctcctggggttttgctgtcagagtgaaacttatctgtaaaagaataagacttctcagaggcctctcaaaggcagttgttggattgagcattttccaaggagactactttgaaccttcattttgaatatcggggttccgatcagctccttatgtcttgttatttttgcgttttgtgtatctgatggtcattgttcttcatggcctccctcctagggagaaatcaggccactccctatttctgatagccctagagttttgttgattgactctcggatgtgtttattttccagacccaggttcctgtcatggctaggggtggctgttggcctcgtccttaccctccactgggaatgtctttgtcttatgcacgtagtctgccttgttgttgcaaataacatttctgctataatcacaggatgccccggcttcttcactccattcgacgtaaccccttcccacgagctccaccttcactatggggtccaccagggtgctgttcagggttaagatcacctgcccttttatgctggagccagccaggtagattctatcctcgggcagcactaattcgatcgacttcaccacagacatggggggttggggggtagagagacattcctctctgtcccccatgtccctgaaattcccggttcgttggccctagtgaggtaatccatctatgacatcactcagctcagagttccgggaagtggggaccccagtggccaggaggggaggcaaaactgttgtttagggtgggtggttgattgggaaacctgtagtcctcactggttctttttttttttttttgagatggagtcttaccctgtagcccaggctggagtgcaggggtgccatcttggctcactgcaacctccgcctcatgggttcaagcaattctcctgcctcagcctcctgagtagctgggaccacgggtgcat[139 bp omitted]ggctttttctttttttgagacaaagtctcattctgtcacccaggctggagtgtagtggcgcgatctcggctcactgccacatctgcctcccgggttcaagcaattctcctgcttcagcctcctgagtagctggaattacaggcatgcaccatcaccatgctttgctaatttttttttggtatttttatttattttatttttattttttgtgatggtctcactctgtcagccagactggagtgcaatggtgtgatctcggctcactgcaacctctgcctcctgggttccagcgattctcccacctc[134 bp omitted]tggcctcccaaagtgctgggattacagttgtgagccactgtgcccaggtgcatacacactcattttcatcttaaagactctacatttatattggtctatattggaaaaaacatagagatatggccaggacctgaaatctggtgcgcactgaagttgatcagggcagtgtgtgcttaatctgaacatcgacaccatcaggaagcagcaactccctgcatgattgacatttctctttttttttgaggtggaatctcactctgttgcccaggctggagtgcagtggcgtgatctcggctcactgcaacctctgccccctgggttcaagcgattctcctgcctcagcctcccaagtagctgggattacgggcatgggggttacaggcacctgcccccgtgcccggctaatttttgttctttttgtttttgtttttgttttttttttgagattggagtctcactttgtcacccaggctggagtgcagtggtgcgatctcggctcactgcaagctccgcctcccgtgttcatgccattctcctgcctca[227 bp omitted]aggctgatcttgaactcctgacctcatgatccacccgcctcacttggcctcccaaagtgctgggattacaggcatgagctaccacgcctggctgacatttctctttatgcctgcatctcccccattggatgggaagtccctccagggtgagaccttgtctaagtgaactttgtgcccatcaatgtctgcgtgacccaggcaggatctggctcagccaggagtgggtgtggggggtggaatcaataaaagtttgttgaatgacttaatgacctctgagaatgtatcattttgcaaaagggaaactgaagccctttgcactctaacaattattcctggcacctgatttgcacatggtctggtgcctgagagggagggacattgaatcataggaggggctaggaagtacccattctctagcctggcaggccttatttcttgtcttggctgtatcttgcattattttatgtgatagcttttgtgggcattggcctcttatttccctaagtcaagctcatccaacccctgacccacgggcc[137 bp omitted]agctctgcctcccaggttcacgccattctcctgcctcagcctcccgagtagctgggactacaggcatgtgccaccatgcccggctaatttttttttgtatttttagtagagatggggtttcaccatgttagccaggatggtctccatctcctgacctcgtgatccacctgcctcagcctcccaaagtgctgggattacaggtgtgagccaccacacccggccacaaatttgtagtttcttaaaacattatgagatttttttgcaattttttttttagctcatcaggtattgttagtgttagtgtattttattatttatttatttatttatttatttttgagatggagttttgctcttgttgcccaggctggagttcagtggtgcaatctcggctcactgtaacctccgcctcctgggttcaagcaattcttctgcctc[133 bp omitted]tggcctcccaaagttctgggattacaggcgtgagccactgtgcccggccagtgttagtgtattttatgtgtggcccaagacaattcttcttccaatgtggcccagggaagccaaaagattggacacccctgctctaagtgacttgtgagctttttttctgagacgcctggaatagtttgttactcatgtttttaaatgattaacttgagcaattattactattttttgagacagagtctccttctgtcacccaggctagagtgcagtggcgcaagcatggctcactgttgccttgatcttctgggctcaagaggtcctcctgcatcagtgtcctgagtagctgggactacaggtgcacaccaccatgcctggctaatttatttttattttttgtagagaagggttctcactacgttgcccaagctggtctcaaactcccgggcgcaagagatcagccttcctcggcctctcaaagtgctgggattgcaggtgtgagccactgcacccagctggacaattaacctgagctaatttgaaaaattttgatgttctcaagatgactagggaactggagccctcaatcaacagtcctcagtatcttttctgcagggagggctagatacctcctctgtgacacttaacttccattatccaaggtgcttaggctgtgcccctcaccacgtgtacatgaagaatgcatgcccagccaatcacagtggctcatgcctgtaatcccagcactttgggaagtccaggcgggcagatcacctaaggtcaggagtttgagaccagcctggccaatgtggtgaaaccccatctctactaaaaataaaaaattagccggacatggtggtgcggacctctagttcctgctactggggaggctgaggcagaagaattgcttgaacccaggaggtggaggttgcggagagccaagatcataccactgcactgcaggctgggcaccaaagcaagactccatctcaaaaagaaaaagaaaaaaagaaaaagaaaaatgtattccctctttcagccacgttgagttttcgcaacagcgctacaaacagatgatgtgttctgatagaaataggctaggttcctgcagcaggtgctgtcattttggaagagctcaagccgtctcacaccctcaggtgggcctgctcatacctgtggtgtgggttctacctggctgatggctgagggtctagaattgtgtgcagtagcgttgatcgtgtactgaggttgcaaacagtgaacagcaccatctggacatcgtggattagaatgcaggagcttcccaaggctgctatgacaaaggaccacaaactcagtggctgcaaaacacacatttatttatttgttgatagagccttgctctgtcacccaggtgggagtacactggctcgatcttggctcactgcaacctccgtctcctgggttcaagtgattctcctgcctcaatctcctgagtagctgggattataggcacacaccaccctgcccagctaatttttttttttgagacacagtctcgctctgttgtccaggctgaagtgcagtggcacgatctctgctcactggaacctccgcttcccaggttcaagcaattctctgcctcagcttcccgagtagctgggattacaggcgccggccaccacacctggctaatttttgtatttttagtagagatggggtttcaccatgttgaccaggctagtctggcgactcctgacctccagttatctgcctgcctcggcctcccaaagtactgggattacacgtgtgagccaccacgcccggcccacacatttatcatcttacagtttgggaggtcagaagtctgaaataaattttaggggcagggcgggttctaggagtctttcttgctttttctagccaccagaggctgcccatcttccttgcctcttggcctgatctttttttttttttttttttttttttgagactgagttttgcttttgttgcccaggctggagtgcaatggcgcgatcttggctcaccacaacctctgcctcctgggttcaagcgattctcctgcctcagcctcccgagtagctgggattacagacatgtgccaccacgccaggctaattttgtgtttttagtagaaacggggtttc[132 bp omitted]cactttcccatctcctttgactttgaccttttgtatccctttttcacttattaggaccttttaaggacattgtgcccacctggatcacccaggagacgctccccaactcaaaatcattaactgaatcacacctgcaaagttgcaaagtccttttagctgtgtaaggcactgtattcacagatcctgggggcgaggacgtgggggtctagagacgcatatcttcgggggccatgatctgtctcctatattagggacatagcagaagtcccactgaccagatagaggagacttaatagagtgacgaagaaactgtaaaaagctaagtgggaactcaacatttttctgctcacagctctcaagggaaagaccaaagtcctccccggtggccttcaaggtattatatatcacccctctgacctcaactccccctcccctttgctcagtgggccccaaccacaccagccccttcctgctccctggacacctctaagccttttccggcctctgggtttgactttccctcctagacccatctgtccttggagtctcatctccgattccagctcaaatgtcatcttctctgagaggcccaccgcagtggccccagtgagagagtatcctctctccccgcctcccaccacatggctgctggtcactctcctataaggaatcatctgaaattatctgctttagttattcatttcttgcctgtctcccccagataggaattttccctccctgagaccaccaactgggtctgccatgtacaccgctgggttctgcagctctgagcaacctgtccggctgctttgtaggtgcccagcacaggtcactcctgtgcccgccaggactggtcagagtggaacagacagggcggagggggcagggcagccctgcccgcctggacagcctggagaaggcgggaaaacgaggcgggaaaagacagcaaacaagccctgcgggtgggtagagtggggagccctggcaggccctgacgccaggcagtggggcttggggcgatcgggcgagccatcagggtgcaggtggtctcctaggggccccccacattccctcgcagtatttacacattgattccggccttcttagacctactggtcaatgcgtgcgagtggggggctgcgaacggacttggacttaagagttcagggggtctgtaccctgggggtccccaaggctcctggggtgtccacgtgcggggggtgaccaggccctgccacgcagcccctttgcacgctgggcgcgcccagcagagcgcgcagggctgggcggagccgtggcccactaggcggaggcgccgtggacagaggcgggggcgccccccaccctctttctcgcttcccgccactgcgtcggccaatcaggaggcaggcgcccgcccccggcacggcctcctgcggccccgcaactcccaaatgccgagttttcgcgggaaaaaaatcagagcagctggcagcgcggcgggcagcgtttgccgagcgggcgctccgggtcgcacgcaagtccgcgcggggtccgggccacgcacgcggtttcatcgccatccccagccgggccacgcgcgcaggcagacaagctgttcgcggcgaccggagaggtgagcgggcgggccgggtcggggtgccagcccgggccgggcgcacggggctcgggaactttgcaaaactttcccgcgcggccagcccgggcgcacgcatgtcccgcactctgtcccgggatccagggcctccccttccacctaaccctcgggaatcgttccccggcacacatccggctggagccgggaccagcgctgcgtccccggagcccggcggggggtcgagcgcgccgggtgggggagggcctggcgagccgccggggaggatgtcaggctccgcgcctgcgcgcggggcgccccgcgattcaattgtcgcgcccgagcccgatttcgcgcgccctgagttccccgggagcatctgggccaatggggagcgagcggggcggggcggccgggtgctgcggagccaataagaggcggctcaagtgaaggggggcgggacttgacgagcgggggccccctctgtagtcccggcggcgggggtgggcgtgggctcgctggcgcgacccgcgcgggccagtgggagtgcgggagggacgccgagggtccagggtttggaggggcgcgagctgccgggggttggaggtcgaggtgagtcgcggggcgcgcgcgctcgcgggtggccgggacggggcggccggttaccatggccaccgcggggcgggcccggtcgcgcacgcgcgcggggggggccggcaaggagggggggcgtgggcaccgaggggtcccggggtccgcggatctcgggtggggtttttccctctcagtggcacttggttgagttcccccgggacttctgaagttccggcccgcgctggacttctgggattccctcttccgtaaataggaatccgaggaatgaatgaatcaatgaatgaatgaataaacgaaccaactcggccacttggcccgggcctcctttctcctctggtcgtggggaaggagggatgggttggaccttctgcttttctttcaattccctcttttcattctccttcctcctcaatcttcaacacttggctagtcgttaatgccttaagtgcttaatttgttgtgtctggtcctggccagggtctggctgtacaggaggactggaagggcatcctgggagtttcctggtgtccacaggccggacaaaagcaaccccgactccttagagcatggcatggctcagaggtgctggtaaaactgatgggggtttttgctgtccctcccctcagcgccgacaccatgtggatccaggttcggaccatggacgggaggcagacccacacggtggactcgctgtccaggctgaccaaggtggaggagctgaggcggaagatccaggagctgttccacgtggagccaggcctgcagaggctgttctacaggggcaaacaggtacacccgccgccagcacctttgttctatgcctggtccaggcctcgcgcctctgcagccaccagccgatactttctccctcccacctccccccccaacaacctcgtccggtcccacttcatctctcccggaaggagaagtccacagaaacctcaaatgcctgcgagaggaaggaacaaagggaggactcacagattgacacgctgggctggcggctggccctcgaatctatagggtctgggcttttaaacttcttttttcaaagctccgcctcaaaataatggctagagaaagaagttttggaggtggccgatggaaggctgaggaattttcgagaaagggcccaggaccatctggtagctaggacggaggggaccaggttttcttttttaaacatccaccaccaattgctctcagcctgtaccggttaagcatcagaccctgcgagtgtttgtttctaaaaatttggattagcttattcagagtctggagatggcgcttgctaatcaggaatttccgccaccctgagcctgctgtgctgcggctgctgctgacctggggcgtgtggtccccgaggggtccaccgaccctcgtctctttctctgttctgtctccagcccctcgttgcatttaaaatgtccccctttgatttcatagctgccacgtttggggcgctccctccattggcacctgggggtggaggtgctactttggttggtgtttttgtgggggactgtgggacctactgggagtggggtttcccggcaggatgagacagtgtgatcgaaggtgtaggtcccatctgctggagttggttggaccgtggggacgggcgtagactactggaactggattaaaagtcgtcagttgagctgcgtgtaccccactgtgttgttgttggattttgaaccgggtactgctgccatctggtgtctaggttggaaaataaacactgcgcccggccaggggtttttgggggctgggaggatcatgcctgctcactccagatgagacctgatgattaatttctctggcttgcatgccataggagaccttcattagccctcttcccgtaagagacgtgatgacttgagtcttaagaatctgagttaacccgccctgccccgggaggaggcgatctggagaacttggggagttgacggtgcaagccgcgtgtgtgcagagaagaggcagggccgggctcgacagaggagctccgcctggcgctctcttcctccctcctcctatgatgcgtgctccctttgtggcatccaaactgattttgatttgccactcagcctattgggtcagcacagaaggcttcatttcacaaagagtttctgaagcctgcaaggaccttctaagttcacagcgtaggtcagtggcgggttggactctcatgctcccaagttcaggagaggagataatgctgagtatccactctatgccagccaccgagctagcattttaacttttgcatttcaaccatgcaggaatgggaaaacacctagacacacctgccatgtagatttcaccatcggtattctgacttattaggtttatcttgaagcgctctgtctttctctctgcccgccaatccatctttttgggatgcatttcaaagtaagttgcagacaccagtccacctttcccttattactgcagcacaccgtcagtacctagagctcagtatttgtttttggttctgttttcattgattttttttgttgttgttcctatttgagacaggatctcactctgcccaggctgtgttgcagtggcacgatcacagctcactatagcctcagcttcctgggctcaagcaatcctccagcctcagcctcccaagtagctaggactataggcatgcaccaccatgcctggctagtttttgtatcttttgtagagatggggtcttattatattgcccagggtggtctcctgggctcaagtgaccctcctgccttggcctctcaaagttttggggttacaggcgtgagctacagtgccggacctaaaagctttgtctatagtgaaacagatgttagacagactgaataattttgacaaatgtctacatccatgcaacccaaaacccctatctcccctcatttgtaacataatacttgagtcatacaatagtgtctgtcacatttctaagtttagtgtgacaatgacaggaacacgtatgttaattagacatgtacattgtgcttttttttttttttttttgagatggagtttcattcttgttgcccaggctggagtgcagtggctcgatctgggctcactgcaaccttcatctcccaagttcaagcgatcctcctgccttagcctcccaagtagctgggattacagtcacccaccaccacgcctgattaattttttgtatttttagtagagacggagtttcaccatgttggccaggctggtcttgaactcctgacctcaggtgatccacctacctccgtctcccaaagtgctgggattacaggtgtgaaccactgcacccagccacgtacattgtgcttttaattgtcaggatgtccgcagtgatgacacctggccctagccttgccggaactcacccggactgaacagggagctgggattggaacctgggattttggtttctgagactgggctctcaacactgaatttcgtctcccaggtcagctctggtagttatgaaaagattcagtgttcctgtgtaaccttcataaccgcctcttagttcccttaccctgtggctgtttcccatgcagtagcttttttttttttttttttttttggagacagtttcgctcttattgcccaaggtggagtgcaattgcgtgatctcggcttacctcaacctccacctcctgggttccagcgattcttctgcctcagcctcccgagtagctgggattacaggtgtgcgccaccatgcgcagctaattttttttgtatttttagtagagatggggtttctccatgttggtcaggctggtctcgaactcccgacctcaggtgattcacacccccctcccccaccttggcctcccaaagtgctgggattagaggtgtgaaccgtcgcatccggcccccatgcagtagcttttaagagatcgtgtcgttgcttctgtcttccgggccacagagaggtgatgcagtttccccacttgcatggctgggaaagtgagctggcagcagggaggtttggacagtggcgggaaggcgggacagaggcacacagcagcacctcccagagcgtgaagtctgcaggcacccaggctaacgtgatagaaagcaacacagttcccggtgggcacaaatgggcagttgtccttatagaatgttctagagtgttcacagtctttttttttccctgtttaaagaaacctggcctagcagcccaaggtctgcagtgaagttgatggagaccccagagcagaacagagttgggtctgtctcggaatatggaggatctcgtggtggtctcacttgggctgaatagggtgacagtgatgtcacttgatgggcgggaacgcagggagctgatcgagggcagtgactttgggcagacggcccagcctaggcaacgggagaggcatctgcggcccccacccctcaatcttttttttttttttggctgcacatcaaaataacaatagctgtcttttgcggcacctttaacctgctcgggtacaacgctctgcactgtacataatcttttcagcatccctggcccgcgactcgccagctcccacatcatcttattttagatagggctaatacccaccacgctgcagcgcagtgcgaattcaatgaggttgtggatttgaagggcggagtgagccctgtgccaggctcacaatgaaagcgaaatcaatctcttagcacagggcctgtcccgctctgcactgtggatgtttggggccaggtcatcctctggctgggaccgtcctgggcactgcagggtgcggagcagcgtccctggcctccacccactccatgccagagcatcctgccctaccagtcatgacaaccacaaatattcccagagacttccatgcctcaaaggcaggattaaggtcagtctgatgcctcagttgaaatggtggcccaggaatggccttgcaagagtcacttgtcacagtgatgcctcaggtgtccccactggacggcccccttgcagagacctgcccttctgtctgcgggagggagggtccccaccaccagctcccacccactgcggcatccctcccccaggatggctccctggtagagggcgcggcctctgttagggtgactcaccactgctgttgtggccccgaagcagctgtagacaatctgtaaaccggtgggcgtggctttgttccaataaaacttgatttataaaaacaggtatggcggggcccagtggctcatgattgtaatcccggtgctttgggaggcc[134 bp omitted]caggagaatcgcttgaacctgggaggtgggaggttgcagtgagctgagatcccaccactgcactccagcctgggcgacagagcaagactccgtctcaaaaaaaaagcaaaacaaaaaacaaaaccaaaacaaaagaggtgcaggccagaattgtccccgtggacatagttggtcaattagattgcatactttaatccagcctcagttggtgtgtctgggttttctggctaggaagaatgctgctgtggaatgtgctggaacagatccttacgtgcgctgtgttggagtctttccaggtcaggggttctcaaacggatttcaggaccctttacatcatccagaatgatccaatagccccaggagcctgtgtctgtgtggattatgtctgccggctgttagtgtgttagaagttgaggccaggcatggtagctcacacctgtaatcccagcactttgggaggctgaggcgaggatcgcttgaggttgggagtttgagaccagcctgggccatgtagcaagaccccgtctctacaaaaaatgaaaattagccgggcatggtggcgcatgcctgtagtcctagctactcgggaggccaaggtgggaagatcacttgagcctgaaaggttgaggctgcagtgaaccaagattgtaccactgcattccagcctgggagacagagcgagactttgtctcaaaaaaaaaaaaaaccaaataaattgaaagctgagaaattcagagcacaagaagacaagcgcgccccctcttttagctgtcaacatggcggagccgtccctggtgacgcagcctccaaaggcctccctgtgccctcctgagaccgcaagagggaaagtggcagcgacagtgatcgtggtgtctttgtggcggttgtgttgacctcactgacccccgaagtgccgctctagggtctgtcctcagcggtgacccggccgggtcgaagggcagagttccgctgtcactagccctccacccgtcctgtgtgctgggatgccctcgcggcgccgtccacgccaccgccgccccctcttgtgggttctgtctcctccgtgtctaggatcctcctgcatccgtttttccttcctcccttctctccctccgtctgtcttgcccgcacctgaggttgtcgcagaggcgctgagacgggccagcaggagctgtggctgcccctcaggaaggcagagcagtttctcacttccttccccccaggtcccgtcaggcccctgcaggcactctctcttccggctggaggtccctcctgatcgaggcttacacggtctttgctgagctcctaaacttctggtttctatccctaaagttggagaaccactgctccccaaacccggtggcattatctgccctgctgtgccgctaggcagtgttcggcaccctgaaagagagcccctgaatgtggcacgaggggtaggaagtgggcagctcggtggggggggggggtgcagtgagcttttagtcttaagttttcgtttttttttttttttttttcttttttatagagatgggatctcgcttttttcaccaggctggtcttgaacccctggcctcaagtgatcctcccatcttgacttcccaaagtactgggtttacaggcatgagccaccacactcggccctttgtctaagttttcaaaaggaatcagcaaacttagttatcaagttgtatttgtatttatctggacacttttttttcttttcttttttttgcctttaagggagacagggtccacaaggccgggcgtggtggcttacgcctgtaatcccagcactttgggaggctgaggcaggcggatcacgaggtcaagagatcgagaccatgctggccaacatggtgaaaccccatctttactaaagatacaaaaattagctggggatggtggtgcacgtctgtagtcccagctacttgggaggctgacgcaggagaattgctggaacccaggaggtggaggttgcagtgagccgagatcacgccactgcactccagcttggcaacagagcgagactccgtctcaaaaaaaaaaaaaaaaaaaaaaaaagagacaaggtcttgctgtcgtccaggctggagtgcagcggcgtgatcatggcttactgcaacctctgttttccaggctcaagcaatcctcctacttcagcctcctgagtagctgggactacaggtgcctgccaccacacccaatatttaaatttttattaattgaaaaaacttttttgcagagacagggtcttgcctggtatcaaactcctgggctcaagtgatcctcctgcctcggccttctgagtagttgggactacaagcatgagctattgggcctggcctagcttttatacaatgcccatgttacaaaattccaaatgtccaaaaagcaaggagaatatcttccactctgccttgaccttcagtttcccccctgtagtaacctgtctgcttccagaagtgcttgaacatgtgtgcgtttgctatgggtttttttttgtttgttttgttttgtttttgagatggagtctcactctgttgcccaagctggagtgcagtggcgtgatcttggctcactgcaacctccacctcccaggttcaagtgattctcctgcctc[137 bp omitted]ggcctcccaaaatgctgggattacaagtatgagtcactgtgcctggcctgtttttttttttttgagacagagtcttgctctgtcgccaggctggagtgcgttggcttgatgtcagctcaccgcaacctccacctcccgggttcaagcaattctgcgtcagcctcccgagtagctgggactacaggcatgcaccaccatgcccggctaattttgtatttttagtagagacgaggtttctccata[133 bp omitted]ttgctctgttgcccaggctggagtacagtggcacgatcttagctcactgcagcctcgaattcctgagctcaagtgatcctcctgcctcagcctcgcaagtagcagggactataggctgtatactactatacctggctgattttaaacatttttatagagatgggttcctgccatgttacccaggctggtcttgaactcctagcctcaaatgatccttctgcctcagcttcccaaggtgctgggattatagacctgagccactgctcctgacctcattttttttttttttttttttgagacagtgtatcagtgtctcccaggctggagtgcagcggcgcgatctcgactcactgcaacccctgcctcttgggctcaagcaatcctcccaccacagccttccaggtagttgggactagaggtaaattttatagtgatgggttttgccatgttgcccaggtgatcttcaactcctggactcaagtgatcctcccgtcttggcctcccaaatcatacctgagattacaggcatgagccactgcacacagccccattttaacttttttttttttctgaggcagagtctcgctctgtcacccaggctagagtgcagtggcgtggtcttggctcactgcaagctccacctcctgggttcatgccattctcctgcctcagcctcccgagtagctgggactacaggtgcccgccacctcgcccagctaattttttgtatttttagtagagatggagtttcactgtgttagccaggatggtttcgatctcctgacctcatgatccacccgcctccgcctcccaaagtgctgggattacaggtgtgagccaccgcgcctagcccattttatcttttctgataatgattttccttttgccaaaaacggcaagtgggttttagattaagtcactccttttaccaggcacagtaggagaccttgagttagggctgaggtggtgtcatttaatagggacattcaacttcactaggttcaatgataggagactttacaaatttccataatggtaaatcttctttcatttaaattattattattgttaatatttttttttttgagacagagttttgctcttgttgcccaagctggagtgcagtggcgtgatctcaactcactgcaccctccgcctcccgggttcaagcgattctcctgcctcagcctcccgagtagctgggattacaggcacccaccaccacgcctggctaattttgtatttttagtagagacggagtttctccatgttggtcaggctggtctcgaactcctgacctcagctgatccgtccgccttggcctcccaaggtgctgggattacgggcatgagccatcgcacccggccaatcatttaaattattaatgaagaataaaaagaggctgggcgcagcggctcatgcttgtaatttcagcacttcgggaggctgaggcaggcagatcacctgaggtcgggagttagagatcagcctggccaacatggtgaaacctcgtctctaccaaagatacaaagattagctgggtatgctggcatgtgcctgtactctcagccattcgggaggctgaggcaggagaatcgcttgaacccgggagacggaggttgcagtgagctgagattgcgccactgcagttcagcctgggtgacagtgagactccgtctcaaaaaaaagaaaaaaaaaagtaagtcccacgtagccatcaccctctgcagtagtcatctgctgtgtctgatcttgttcattttgctcatttctaccctacccacttacctctacctgactggattgtttaagagatgggatcttgctgtgttgatcagggtggagcacagtggctattcacagatgtgatcattttgcatgagaaccccaaactcctgggctcccctgaccctccagcctcagtctgccaagcagctgggactacagatgtgagccactgtactggctcctactggatcattttgaagtgagttacagatgccataactataacacagacatcataggtacaggaatttcagtgcatcttccccagtggctcatggatcacacagatagaaaatcggtcaggagggccacgcgcggtggctcacacctgtaatcccagcactttgggaggccaaggcgggtggatcacgaggtcaagagatcgaaaccatcctggccaacatggtgaaaccctgtctctactaaaaatacaaacattagctgggcgtggtggcatgcacctgcagtcccagctactcgggaggctgaggcaggagaatcgcttgaacccaggaggcggaggtcacagtgagtcaagatcgtgccactgcactccagcctggtgacagagggagactccgtctcaaaaaagaaaaaaaaagaaagaaaatcggccaggatgccgggcacggtggctcagccctataattccagcacttcgggaggccaaggcgggtggatcaactgaggtggggatttcgagaccagcctgaccaacatggagaaaccccatctctactaaaaatacaaaattagccaggtatggtggcgcatgtctgtcatcgcagctactcgggaggctgaggcaggagaattgcttgaacctgggaggcggaggttgcagtgagccgagattacaccactgcactccagcctgggcaacaagagtgaaactccgtttcaaaaaacaaacgaaaaaggaaagttggtcaggatgctgggcacagtggctgggtcctgtaatcccagcactttgggaggctgagtcagaaggatcagttgagcccaggaatttgagaccagcatgggcaacatggagaaaccctgtctgtacaaaaaatacaaaaaactttctggacgtgatggcccatgcctgtagtcccagttacttggaggggccgaggcgggagggttgcttgagcccaggaggtcgaggttgcagtgagccatggtcgtgccactgccctccagcctgggcaacagggagggagaccctgttttaagaagaaaaagaaaattgataaagatgtagatgatttgaacaacacaagtaacagggttaccgtaatgacatggatggaatctgaacccagcaagagagaaaacacattcttctcaggccacgaggagtgcttagggaaactgaccacatacaaggcaagtcttaaaaactcgatttttatttttatttgtatttacttattttgtttatttatttgagacagtctcgctctgtcgcctaggctggagtgcaatggtgagatttcggctcactgcctcccaggttcaagctattctcctgccttagcctcctgagtagctggaattacaggcgtgcgccaccacacccagctaatttttgtatttttagtagagatggagtctc[132 bp omitted]ttgtttttgagatggagtcttgctctgttgcccggactggagtgcagtggtgtgatctcggctcactgcaaactctgcctcctgggttcaagcaattcttgtgccacagcctccccagtagctgggactacaggcgcccaccaccacgcccgggtaattttttgtgttttcagtagagatggggttttgccatgttggccaggctggtctcgaactcctgacctcaggtgatccatccgccctcggcctccccaagtgctgggattacaggcgtgcaccaccgtgcctgaccctttacaaatttagaacaattactgccttactgaccatgttttctctcacctgtggggtcagaacttaacaataactaagcttcctccttcgcgcttcgggttgtgcaagcttcctcctgcctgctttggggcctttctgcaatgttccagaagcggcatcaggaggctgcccagccagctcgtgagttgtgttctggagtcagagttttgtgccagcctgggccaggccccatccccacttcccgccccatttgcccctgtctacatcattgtactgggagacacttcctgtccctcctacgtagcccacgctaagcagggtgcttctatccacctcacctttccgatgtgggaagggccgaagtcatggaggggcgacccgtcaggcccagcaagggtggcacagatgttgtccctagtaacagatgagaggggatgggctgggactgcaggcctggctccccaagctgctcctgcgggtcaggggctgcccattagcctggccagggcccctcattggatccctcctggccgcccagaccacagcccttgcccccctgcctacccgccaccagttctcattggccctgcctccctgcttaactctgccgccttggcttcccctcctcggtctgtctcctccccgacttgtcctctgtctgagtctggcaggacagagtccgaccgtctggccccctcctggctccgtctgctcctcctgccgcctcctgctgtcgaggtcacttggttcttggcctgtctggcccccagccaccctgctggctgcctgctctccaggcagcccctcgcccagggctgcacctccgacctgtcctccgtcttgggtggggctgggactgtattttccatcctctgcagtggtctggtttccctcgtgcgctgaggcccctctgcttggctgcccctggctgccccatgcagctgagccatgagcgcggcctgtgtgcccctctcccgctggctggagctcaggatgctcacgccgctctggcagatatcgctgctgcaaacataggaggagcagctgcccctctgcgcacgtggccttcggacacatgtgagggccgctctagcttgggtgctcactgcgggtgattccaccctccaggggacactgggggatgtctggggacattcatgactcgggcgctcctggcgtggagtaggtggaggcctggagtgctgattagcaccctgcagggcccaggaaggccccaccccagagagtgatcagaccccaaatgtcagctttggcaagagcagtgtgcctggccacagaggtgctggcccggatgcagatgagtgccccatccatccctctgagcgccgtgtggcttgtcccatgctgcttttcctgacccagtgatattgggggcacttgacttctctctttttaagacggagtctcattctgtcacccacgctggagtgcagtggcgagatcctggctcactgcaacctccacctcccaggttcaaatgattctgttgccttagcctcttgagtatttgggattacaggcactaaccaccatgcctggctaattttttaattaatttttaatttttttatttttttgagacggagtctcgctctgtcgcccaggctgcagtgcagtggcgtgatctcggctcacggcaagc[241 bp omitted]gggtttggcaatgttgcccaggctggtctcgaactcctggcctcaagtgatctgcccacctcggcctcccaaaatgctgggattacagagtaagccactgtgcccagccccttttttagaaaaaattaataaactttattttctagagcagttctaggttcacagcaaaattgagcagaaggtacggagttcctatagaccccctgccccaacaggcatagccgcccccactgtcagcctcccccacagagcggtgcatcggttacagttgatggcccgatggccctctgtggagtcatcttcatctctgagtccacagtctacatacaccaaggcttgcccttggtgttaagtttttttttttttttttttgagacagtgtctcacttgtcgcccaggctggaatgtagtggcgtgatctcggctcactgtaacctctgcctcccaggttcaagcgattctcctgcttcagcctcctgagtagctgggactacaggcgcgtgccaccacgcctggctaatttttgtatttttagtagagacgaggtttcaccatgttggccaggctggtctcgaactcctgacttcaagtgatccacctgccttggcctcccagagtgttgagatgacgggcgtgagccactgtgcctggcctgcttcatgttttaaataacggctttattatatccctgcagttcacccagttaaagtacacagttgaggtatattcatagttgtgtaatcatcactgcagtctattttagaacattttgtcaccttgaaaggaaaccctgaaccctgtcccagctactgcttcctttttctgcatctcctcccgcagcccctggcaccctcaaatccccttcctgcctctgtggcttggcctgtcctggaaatttcatagaaatgggatcatgcactgcgtggccttttgtgtctggtgtttctcactgagtgtgatgtcctcaaggtgcatccacactgtggcctgggtcacagccttgctccttttcatggctgagtcgtattttattttgccttatattttatttattttattttatttcttaagacagtcttgctctgttgcccaggctggagtgcaatggcacaatctctgcttactgcaacctccgtctcccaggttcaagcaattctcctgcctcagcctctggagtagctaggattacaggcacccgccaccacgcccagttaagttttgtatctttagtagagacggggtttcaccatgttgaccagggtggtctcaaactcctgacttcaggtgatctgccctcgttggcctcccaaagtgctgggatgacaggcgtgagccaccgcacgcggcctgagtcatattttgacacatggatggatggccacattgtgttgatcctctcacctgttttttcttttctttctttctttttttctttctttttgagacggagttttgctctttttgcccaggctggagtgcagtggtgcaatctcggctcactgcaacttctacctcccaggttcaagcaattgtccttcctcagcctcccgagtagctgggattacaggcacctgccactatgcccggctaattttgtatttttagtagagacaggtt[148 bp omitted]caggctgttgcgagtgatgccgtgtgaacctgcgtgtacaggttgacgtgcctcttcctctccatccgtgccacctctccccaaagccagctgctctgtgctggagagctggccctgagcctcctcctggctcccaggcagcgcctagcatgtcagaggcactcacttctagctgggagaacagaggggctgaagcggatattggtgggccctcgatgtccacggtgggtttcagagcagcccttgaaacccttgtagctgtaggtgggtgtgtacatattcaaacgggtttttctgatgctggtggatcgcttgcttgagccccggagttcaaaaccagcttgggcaaagcagcaagacctcatctctaaaaaaaattagctgggcatgggtgatgtgtgcctgtggtcccagccactcaggagcctgaggcaggaggattacttgagcccaaggttcgatgctgcagtgagctacgattgcaccactgccctccatccttggcaacagagtgagatcctttctaaaggaaaaaaaaaaaaaagtccgggtgcagtggctcacgcctgtaatcccggcactttggaaggttgaggtgggcggatcacgaggtcaggagatcgagaccattctggctaacatggtgaaaccccacctctactaaaaatacaaaaattagccgggcttggtggcgggtgcctgtaatccccgctacttgggaggctgaggcaggagaatggcgaacctgggaggcggagcttgcagtgagccaagatcgtgccactgcactccagcctgggcgacagagcaagattccgcctcaaaacaaaaaacaaaacaaaacaaaacaaaaaaaaacaggccgggtactgtggttcatgctgtaatcccagctctttgggaggccgaggtgggtggatcccttcagcgtaggagttcaaaaccagcctggccaacatggcgagaccctgtctctactaaaaatacaaaaattagctgggtgtgatggctcatgcctatagtcccaagctactcaggaggctgaggcacaagaatcgcttgaacctgggaggtggagattgcagtgagctgagatcacacccctacactccaccctgggcgacagagtgagactccatctcaaaaaaaaaaaaaaaaaaaaaaatttttttctggaaaagatgagtcagcctttatcaggttcttaggtttatggtgaacaaagaaagaaagcctgcagagaagggccttggccttcactgtgacccccatgctgtttgcatttgaacagccgtcaggccttggatccccaaggggcgaaaggaggaagagctgacattctatgtatgtctctctcctcccttttcctaaggtctctctcctcccttttcctaaggatgctcctgaaccagggcatttctgcctctaggggacacatggtgatgtctgggggacatcggttgttgtcatgactggtggaggccagggccgctgcagtgcctctgcagtgcccagcacggccccacggtccagtgcccagagggggagacccagcccatcccagagtggtcagccctaatgtcagccatgcttaggtcgagaaacctgtattaattacatggaaaccaaccgagtccaatcctgctcgcaccaggcacgggataaactcctgacggggcagacgtggaaaccagggggacccccagctcctgggattcacctcctctctcccttcccactcagtgtgtggattttaatgcgtgcagcctcctgggacctcagtagggcacagcatcatgggataaggagtttcttgggggcctgtggaatccttcaccagggggtctcacccagggtgacttcacacccccccaccccataccgtatgatgtctggggacatttgtggtcgtcacaactacggggtgctcctggcatggagtaggtggaggccagggacgctgctcagcaccctgcagtgcccaggatggctccgccccagagaatggtccaggacctggccccaatgtctgcagtgccgggggagaggaacttgttgccttgggggcatctagatggcaaatcatcaggaggggggggtcctagatggcaaaccaccgggagagggtccttgttgggtgttggtggagtgtgaaggggcagcttctgacaaaatgcctcggcttctccagcccccagatacagctcaggtgatgagctcctccttgcatacctgctgagtcaggtgacccgaggggcaggctgtggagccaggccccaggggttgagcgcatcaggataaaagcgcacaaagggcgggtggagctgagggtcagaggaggtgccctggcaggcgagattggcgctggagccttacccaggaagctcataggaagctcatggatgctggcatgtgcctcttgctgttcaggtgggacagggtctctctgtctcgacactggacagtgggaccgtcctgggcactgcagggtgccgagcagcgttcctggcctccacccactccatgctaggagcttctcccagtggcgacaaccacaaatgtcccagacgtggcccagcgtcccccggggtctgaatcatgtttggttgagaagcagtgacagaggtgacacatgttcactgtcacaaaagctgccgtaagcacgaagtattaggaaaaactcccaagacccccatgtgtgcgtggtgccccgtgatgatgttttgtgcttctgggtgcttcctgcatgcagtgccaaaagccctcgctagaggggcctgagaccctgagggaagggactggggtgccgcttgtgagcgggacagccccctggcatggcccaggtatcatggctctttactctgatgcagattgccccccccccacaagggctgggacacagtgtttggttcatcactggtgcccacagatgcccacttggcatttggtggctaaacagcgtctgcctctggtgtccctgcagatggaggacggccataccctcttcgactacgaggtccgcctgaatgacaccatccagctcctggtccgccagagcctcgtgctcccccacagcaccaaggagcgggactccgagctctccgacaccgactccggctgctgcctgggccagagtgagtcagacaagtcctccacccacggtgaggcggccgccgagactgacagcaggccagccgatgaggacatgtgggatgagacggaattggggctgtacaaggtgagcctcccctccgcagctgctctggggttggacgttctccctgccattctggtctttgcatacccagggctcacaggaggggcttcccacgcgcctctctagctctggctgggcagaaatggccaaggggtggtttcctgcacgttccttgaggggaacatggtaccctgggattcctttgtggacctctagagcagagtcctgttcggggcctgcaggtgtcttctccgtgaagcttgcagtggctgtgacgtttctgaacttgctgctaccatgtaagatcaggaaatgtcacagaaagatctgggtttccagcttttttatttttttattttttttttggcagggtctcactttgttgcccagcctggggtgcagccgtgtgatcacagctcactgtagcctcgaactcctgggctcaagtgatcctcccacctcagcctcctgagtagctgatgttataggcatgtgccaccacgcccagctaattttattttattttattacttttttaatacatggtctcattctgtcgcccaggctggagtacagtggtgccatctcggctcattgcaacctccaactcctgggttcaagcaattctcgtgcctcagcctcctgagtagctgggattacaggcatgtgccaccacacctggctaatttttgtattttttgtagagacgggatttcgccatgttggccaggctagtcttgaactcctggcctcaagtgatcttcccgccgcagcctcccaaagtgctggaattataggtgtgagccactgcacccagtctgttttattttttagtagacacagcgtcttaccatgttgcccaggctagtcttgaattccggggctcaagcgatccacctgcctcggcctcccaaagtgctggtattccaggcgtgagccacgacgccctgcctggatttccagcttctcttgacaaatgggcagctctggtctctcagggcctcccagcagctgtggctgaagcagagccgcaggggcctttgttaagacagtccatgccccctggccccgcatccccgtcacccctgccggggctggtttctcatggtcagcggttcccagccagggaggagaaacctcgctgtgggcattcgagtttgcgccctggttccagagcatcccagtgtccgagaaccaaggtggtctcccgtcagttttcctcaccccgttgggatgccagacttccctcattcctcacaggtcaatgagtacgtcgatgctcgggacacgaacatgggggcgtggtttgaggcgcaggtggtcagggtgacgcggaaggccccctcccgggacgagccctgcagctccacgtccaggccggcgctggaggaggacgtcatttaccacgtgaaatacgacgagtgagtcatggcaggtgggcgggcctgggtattcaggctctgtgacgcgcatccttggctgcgggtgttcaggccagagcttggcactgtctcgagatggtgatcaggatctggggccccatcctcgaattcctaacagcatacgaggctgcccacttggggactagcctggggacccgaagccggctgccccctcctgtgtctccgcggagggttctgctcgatcagtggctgaaactgccaccccatcagtttttctgttttattccatcttccgggtttgtcatctctccctcatccccacccctaacgtcagtctccagtctttgcacaagtgtttactgggcacttcctacctgccaagttcggggtccacacaccagtggacacagatggtggctgcgtctgtccgtgctgccatcgtgagatttcacagacggtgtggcttaaacacggacattggttgacttgctcactgcaacctctgcctcctggattcaagcgattctcctgcctcagcctcctgagtagctgggactacaggtgcccgccaccacacccagctaatgtttgtatttttattttattttatttttattttattttttcgagacagagtcttactctgtcactcaggctagagtgcaatggcgtggtctcagctcactgcaacctccgcctcccaggttcaagcgattctcctgcctcagcctcccaagtagctgggattacaggtgtgtggccaccacgcctggctaatttttgtattttcagaagagatggggtttcactatgtaggtgaggctggtctcaaacttctgacctcgtgttccgcccgcctcagcctcccagagtgttgggattacaggtgtgagccactgtgcccagcttattttatttttttgagacagtttcactctgtcccccaggctggagtgcaatggtgtgatcttggctcattgcaccctccatctcccgggttcaaacgattctcctgcctcagcctcccaagtggctgggactacaggcgtgcaccactgcgcccagctaatttttgtttttgttttgtttttgagacagagtttcactcttgttgcccaggctggcgtcaatggcgcgatctcggctcaccgcaacctctgcctcccgggttcaagcaattctgcctcagcctcccgagtagctgggattacaggcatgcgccaccacgcctggctaattttgtatttttagtagagatggggtttctccatgttggctggtctccaacttccgacctcagatgatctgcctgcctcagcctcccaaagtgctgggattacaggcatgagccaccgtgcccggccatgcctggctaatttttgtatttttagtagaggcagggtttcacc[133 bp omitted]gattggggcccaccctactgcagtgtgatctcatcttaatatgatttcatctgcaaaggttctatctacaaagaccctgtttccaaaaacaatcctattcgtgggtactggggatcagcctttgaacatctctttttgcaggggacacgggcaacccataacaattttgtacctggaatgtgccttaatatacctgtgtgttctcaacaccagcatataagcctgttgggaggggcctctgcacactgtcgggaggggccgtcccacctcggctcgtttcccattgagggaaggaggcttggtcttagcacggggtctaaggcccgggctttcctcccagctacccggagaacggcgtggtccagatgaactccagggacgtccgagcgcgcgcccgcaccatcatcaagtggcaggacctggaggtgggccaggtggtcatgctcaactacaaccccgacaaccccaaggagcggggcttctggtacgacgcggagatctccaggaagcgcgagaccaggacggcgcgggaactctacgccaacgtggtgctggggtgagcctcgcgtcctggggcgagcccttcctctctcctttcctcccctcccggggcccccggactggctttgaagccgtccagccagcgctgtgtgtgcgaggcccttagcctccggcctggccttcctgcctcccctctggggtctgttcctgctcactgctgagcatctttctaagaccgaccaccttgtgcccctgagtgcctctgcccagggaactgtctctgacccccaggccctgacaggcagagttgtcaaacttcctttttctcatggtgttttttttatcgctctgttgcccaggctggagtgcagtggttcgatctcggttcactgcaagctctgcctcctgggttcatgccattctcctgcctc[173 bp omitted]tgcctggcctcaagctttctttttctctcttgtttgtttcaaatttggtgaataggtcccattcacagggtcaaaatagaaagcacccaagaccacacatgaaggttctccctcctctgcctggtcacccagttcccctttttggcgacatcactgttaccaactttccagggacattctgttcataaacatacacgccaaaccacaccgcttaggagttggcaaactgcagtccacaggcctgctgtggtccgctgccggctttgactaatagttttattgggacgtggtcacacccatttttatcttattacctgtggttgcttttgtgttataagagcagagttgtgtagttgcaacagagactatgcggcctacaaagctgaaaatccttcctatttggccatttgcagaatcattttgcaaagcctgttctttctcccttgcctctttgtgtgtgtgtgtgcgtgtgtgtgtgtgtgtgtgtgtgtgataaaatgtatgtaacagaaaatttaccttttttttttttttaaaagacagagtctccctctgtcgcccaggctggggtatagtggcatgatcttggctcactgcagcctccgccttccaggttcaggtgattctcctgcctcagcctcccaagtagttgggattacaggcgcccgccaccacgtctggctaatttttgtatatatatatatatttagtagagtctgggtttcaccatgttggccaggctggtctcgaactcctgacctcaagtgattcgcccgcctcagcctcccacagtgctgggattacaggcatgagccactgcgcccggccaaaaatttaccattggaaccatgtttaagcgcacagttcggtggcattaaacgcatttacgttgttacgcaaccatctccagcactttgtcctcttcccaaactgaaactctgactccatgaaacactcactccctagcccctgacacctctgcatcctactttccatctctgtgaatctgacaactcgggggacctcctaggaatgggatcacacaggatttgtcctttgcatctgttcactgacgtcactgagtgtgatgtccttgaggtgcatcaggctgtagcctggtcggaatttccctcctttttgtggccgagtgatagtacgtgacgtgttgtctataaacacgagcatcttggcaacggcgttccaagtacaggtacagcaagcacgcagaggtcctgggctgggacatttatggtgcatctgtggcccggtagggaggtcagtgagctgcgggtgatggaggggagtggctggggctgtgggagcctcctcactgagtctgggccttaagcgcgtggctcgggtgtggtgtggaattggtctttattctctgctaggcgcatttctgaatctgagattttctgagaaactatctggattgttatatggaatctgatttttaaatgctggtgactaactttttttttttgagacagagtcttgctctgtcacccaggctggaatgcagtggcaggatctctgcttactgcaacctccacctcccgggttcaagggatcctcctgcctcaccctcctgagtagctgggactataggtgcccaccaccagctaatttttgtatttttagtggagacagagtttcaccatgctgccc[136 bp omitted]ctgccgctgtgtaagatgtgcctgtgctcgttcaccttccaccatgattgtgaggcctccccagccatgcggaactgtgagtccattaaacctctttcctttctaaattacccagtctttattatttagtatgtctttattagcaacatgagaacagactcatacaaccccttccaagctcttgtggtggctgatataatccactactttgcggttgaaggatgggggcttcatttttttttttttaacttggttcttggaggccgcctgcagttcccagggcccacctgcagttccttgccccatgggcttctctgatgtggctactgatgtcaagctagcaagggaggtcttcagctagtcggctagtaagatatagagcatcgtgtgatgtgtcatcgtcccaggagtgacagtccgtcagctctgctgtattttatgggttaggtttaagtgacagccctgtccatacttttatggggagaaacgcctacaaatgcgtggttgccaggaggtgggggttgtggggccaccttaggctccatccgcaccagttatacaccagctgctgcccgtttaccctgagacagataacctgcccagccagcacccacgggcttcctccacctcagtccctcccctagcagaagaaaactgcatttctgcacattgactgtcacaaggcaggggtgtcaccaggcagggaaacgaagatacctggccgaccacaccttggggtgtttgggttcttcgattcattcatgcttgtgtcccgagccctctggggatgcaggaggcacagcgggaaagggaacaggtgctcggtccaggcggccttggggcagacactgtcccttgccagccccatgggagcttccagggatgcagtgagagggtcacgctgagccgagttgtgcctcgcaatgagtttgtgatgtgtgcccatcgttagcaccttcgacttctatcatctgctgagtcaggcatcatacaagatgagacagagaaacgcgattgcagtccctgtcttaggaggcacccagcctggtgtgggagacagatctgcagatgacagaccagggagatgcgtgctctgagacaacacgcgaggatgggtggcagagatggccgagtggactctgggattgggaggctcagataggtggctgagccccaggtcctgctctgggcagtgctaggagctaccagcctttgccagggctgacttctaaatgcaagccctctacactggtgtctctgcagtgtggggggtcaattcattcatcattcattttcattaaattttaccttgcattgtagattcacatgcagttataatgtagagatggctaggcgcagtggctcaggcctgttgtcccagcactttgggaggctgaggtgggaggatcgcttgagcctgggaggttgaggctgcagtgagccgtgatcacaccactgccctccagcctaggcaacagcaagagagtctgcaaaaaaaaaaaaaaagtgaaaagaaaaaaaaacaggctgtgtaccctttattcagtttcccccagtggtaacaacttatattaataaactatactgtgttatcacaactggaatattgacattgatacagtcaaaagtgagtttcctcctcacaaaatccttctcgttaccccttttatagccaaacccacctccccatccccacctggtccctgacccccggcaagcaataatttttttttttgttggagacggagtctcgctctcttttgttctccattcatacaattttgtaatttcaaggattttacaatttcaactttgtaataaggattcccgttatataaatggaatcacacagtatgtaaccttttgggattgattctttttttcccgactctccataattacagattaattgaagttaccgcatatcagtagctcattccttttcatccctgagtagtattctgtggtatagatgggccacttttttttttttttttttttaacgacccattggatatctgagctgcttccaggattttttgctgtttaagatttgtttatttttttgagacacagtcttgctctgtttcccaggctggagtgcggtgatgtgatcttggctcactgcaacctccgcctcctggattcaaacgattctcctgcctcagcctctggagtagctgggattacaggtgcgtatgccagcacacccagcttatttttgtatttttagtagaggtggggtttctccatgttggccaggctgatcttgaactcctgacctcaggtgatccgcccgccttggcctcccaaagtgttaggattataggcgtgagccacttcgcccggccagtttaggatttatttgagtaagttaataagaaacagtggtctgcaattctcttgttttgtatggtctttgttggttggtcaataccagccttataatgtgagctgggaaatgtttattcctttttctgttttctggaagagattgtgtaaaatttacgttaattcttctttaaaggtttgatagaattctttaacgagaccataggctgggtgcagtggccgatgcctgtaatttcagcacttggagaggcggaggtgggcggatcacttgaggttaggagtttgagaacagcctggtcaacatggtgtgaaatccccgtctctactaaaaatacaaaaattagctgggcttggtggtgtgcacctgcagccccagctacttgggaggctgaggcaggagaatcgtttgaacctgggaggtggaggttgcagtgagctatgatcatgccattgcactccagcctggatgacagagcaagattccgtctcggtggggtgggggaggaagggaagctttactgaggccatggagatctggagatgtcttctggaggagcttttatgaattgaatttcttctatgcttatgtgactgtctggactatctgtttcatcatgtttgagctgacatactttctgggttttggggaattagccggtttctctgagcataaagtcatttgtattatttccttattctctgatgcctgaaggatctagtgagatccctgttttattcttggtgttggtaatttatgttttctttttatttttgtcagtctttaccaattttatttttgaggatcttagacctttccctcccttctcatttatttgtacagcaagaataagacagtttttttttgtttgtttgtttgttttgagacaaggtctcactctgtcacccatgctggagtgcagtggcgtgatctcagctcactgcaacccccagatcctggcttcaagcgatcctgacctcaggtgatccactcgtctcggcctctcaaagtgctgggactacaggcatgagccactgcacctggcataagagttttgttttggtcaggtttttttttttttttttttttttttttttttgagataaggtcttgctctgttgcccaggctggagtgcaatggcaagctctcagttcactgtagccccaacctcctgggctcaagcaatcctccaacctcagcctcccacgtagctgggaccataggcgtgcaccaccatgcctgactaatttttttttttgttttttgatgagacaaagtctcgctctgtcacccatggtggagtgcagtggcacgatcttggttccctgcaacctccacctcccgggttcaagcgattctcctgctttagcctcccgagtagctgggattacaggcgtgctccactgcacctggctcatttttttttgtattttcagtagagacagggtttcaccatgttggccaggctggtcttgaactcctgaccttagataatccacccgcctcagcctcccaaagtgctaggattacaggcatgagccactgcacccggccattttttttttttttttttttttaattttcggtagcaatgggggtctggctagattggtctcgaacttttgagttcaagtgatactcctgcctcagcctcccaaaaggtgctgggattataggtatgagccactatacccagtcttagaatatgtttttctttctttttttttgagacggagtcttgctgtttgctgtctcacctaggctagagtgcagtggtgcaatcatagctcactgcagccttgaactcctgggctgaagcaattctcctgccttagcctccttttccttaacacttaatttgttgaggaatcctggtcatttgtcccaggagttccaaatggctctatccagactgtagagatgaccaggagatgtcacttgctgtgtgcgtctgtgctacctgtgagctggtaggtcagtgtgttcccacactgtcccatagccaagagccacctgtgctgtgcttgaaatgtggccaggaggaactggaatgtactgtgagtgtaaaatacacatgggtgccaggcgcagtggctcatgcctgtaatcccagtactttggggggcc[134 bp omitted]gaggca[136 bp omitted]aagaagaatgtaaagtagctcattaataactttttcatattcattccatgttgaaataatcttttgtctacactgggttctatggaacatattccaattacttccacctatgtttacctctcaaacgtgcttattaggaaatttagaattacatacacagcgtgtgttcaagtgctgtttccctcggacgttgctgatggggatgtcggattattgatctcgggggatcagtttcactcacaggagttcttgtattttgatgtaggccattggatcaagcgttgcctttatgattttttttttttttttttttttttgagatggagtcttgctctgtcgcccatgctggagtgcagtggcgtgatcatctcagctccacaacctccatttcccaggttcaagcgattctcctgcctcagcctcccgagtagctgggattacaggcacgggccaccatgcccagctaattcttgtattcttagtagagacggggtttcactatgttggccatgctagtctcgaagtcctgaccctcgtgatccacccaccttggcctcccaaagtgctggaattacagatgtgagccacggtgcccaacttgatttatttatatatttttttgatgagatggagtctcactctgtcgcccaggctggagtgcagtggcacgatcttggctcacttcagcgtctgcctcctgggttcaagcaattctcctgcctcagcctcctgggtagctgggattacaggtgcgcgctaccatgcccagctaatttttgcatttttagtagagacagggttttaccatgttggccaggctggtctcgaactcctgacctcagatgatcggcctgcctcggtctcccaaagtgttggaattacaggtctgagctaccatgcccggccaacctttatgagtcttgcttgtcggttcttgtggatttggtgctccttagccaaaggttcaaactcattcttcccagggcatcctgcaatgaaactctggtt[134 bp omitted]gcctcccgagtagctgggattacatgcgcgcttctccaagctcagctaatttttgtattttcagtggaggcgggggttcaccatgttggccaggctggtctcgaactcctgacctcggcctcccagtgttggtattacaggcgtgagccactgcgccctgttccgtttcatgttgcttctgtgagtgcagctttgattgctagggggcgtagctgagctgttgccccaggcatcccgagaacccgtggtgttcaagtgctgtgagtagatttaggggcctcggcaggccagaatgttccagcgtcctcgttccttgcagggatgattctctgaacgactgtcggatcatcttcgtggacgaagtcttcaagattgagcggccgggtgaagggagccccatggttgacaaccccatgagacgtgagttctgagccagcctttccccatcttccgcggtgggcacggggcgggggctcttgtcccgtctctggcttggccgggccccgccggagctgaccctgccgccccgtgcccagggaagagcgggccgtcctgcaagcactgcaaggacgacgtgaacagactctgccgggtctgcgcctgccacctgtgcgggggccggcaggaccccgacaagcagctcatgtgcgatgagtgcgacatggccttccacatctactgcctggacccgcccctcagcagtgttcccagcgaggacgagtggtgagtgcggccctgcccgccgcggggagaccagagcgccccctacaaatccccagaggggcactgaggagatacaggagaggggcaggcgcgggggctcacgcctgcaatcccagtgctttgggaggccgaggcgggaggatcacttgagctcaggagttcaagagcagcctgggcaacacaagaccagcctgggggacgtagagactctgtttctttttttgtttgtttttttgagacggagtcttttttcttttctttttcttttcttttttttttgcggcggagtctcgctgtctcccaggctggagtgcagtggcgcgatctcagctcactgcaagctccgcctctcgggttcacgccattctcctgcctcagcctcccgagtagctgggactacaggcgcccgcctccacgcctggctaattttttgtatttttagtagagatggggtttcaccttgttagccaggatgttcttgatcccctgacctcgtgatccgtccgtttcggcctcccaaagtgctgggattataggcgtgagccacctcgcccagccttgagacggagtctaatggcacgatcttggctcactgcaacctctgcctcccgggttcaagcaattctcgtgcctc[134 bp omitted]tcagccttccaaagtgctgggattacaggtgtgagccaccatgcctggcctggagaccccatttctacaaaaaatgtaagaaaattagctgggcgtggtggtgctcgcctgtggtcccagccacttgggaggccgaggtaagaggatcggatcgctggagcccaggaggtcgagggtgcagtgaactgtgatcgcgccactgtactccagcctgggtgatggaagtgagaccctatttctttagaaaagtaaaaatgaggtcaggtgcagtggctcatgcctgtaatcccaggactttgggaggc[135 bp omitted]tgaggtaggagaatcgcttgaacctgggaggcggaggttgccgtgaactgagatcgcgccactgcactcaagcctggcgacagagtgagactaagtctcaaaaacaaaaaaaaagggggggtggtgaggaaatcttcccatgttgcttgagtgggtgagacctgcggccagccagggaacagagtgcagggggcttcacagcttctgtgagaggaggtttcgtagccactgtgttcctggcgcacataatgacaattgcggatgtggatggggaggttgtgatgtgctaggctcgggtctgaggacctgcctgtggtcattcctccagcacagaagtgggtgttgttgttgccctgccccccctccccacatcgtagagatggggaaactgagtccacggcagtgagaaggcactcatggaatctgcacgtgtatttcccacatcccacattgcgttcactctcactgttgcaagatccgtggaattctccgtggaaggccaacagagaacctgctttcttttttttttgagatagagtcttgctctgtcctccaggctggagtgcagtggtgcaacctcggctcactgcaacctctgcctcctggtttcaagcgattctcctgcctcagcctcccaagtagctgggattacaggtgcccaccaccatgcccggctaatttttgtatttttagtagagatggggt[145 bp omitted]aagcggcctgcaatgtggacagggcaggatggtagtggtgccaggcggggagagccatgtccgtggtgtgtgggcagagggcacatgttggctgagacatctgccaggctaggcgtgggcagtgacaatcccgacctcgcaggtactgccctgagtgccggaatgatgccagcgaggtggtactggcgggagagcggctgagagagagcaagaagaaggcgaagatggcctcggccacatcgtcctcacagcgggactggggcaaggtgaggcgggtccttcccacgtgcccgtggcccctccccgcctgccagggctcacgctgttgttctttgtgtctgtgcctgggacagggcatggcctgtgtgggccgcaccaaggaatgtaccatcgtcccgtccaaccactacggacccatcccggggatccccgtgggcaccatgtggcggttccgagtccaggtacctgcagcgtcccggggctccaggggccacgcgggctcatcctgcttttctgggggcagtttctcctggctttggccagccaggggtcagggtggttaccagtggtgcctcggctagccgaggaggggtgtggaaagcctgcaggtttgggtttactccttattttaccagggacctgcaatgaatccttgggggtgggggctgctgctctgctcagagacacgtaaggtcattcccaaagctcctgtcccagggaaggggtggcatctgctaagagggacctgtctcagcgctggttgtgatctatcattggggcagcccctgcctgtgactgggtgttgacagtgctgggcgctgtcagctgtgggctgtgtgtcacggcagacgagacactttggcactagtgacattggagccagatggttctctggggcggggccatcctgggcactgcagggtgctgagcagcatctctggcccccacccactccatgtcctcccaagtcatgacaaccagaaacgtctgcagacatgagtgtccccttggaggcaggattgcccctgggtgagatgcactgagctgggtggacaagctgggcctcatcatggagttcatggggccaggcgtgcagggctaggagctcctggggcagcgctgtatccctagtgctcagcggccagccggggccccatgctcaggccagggcctctcaaggcattttgtggagtgagtggcaggctgcacctcaaccggcctaatgaaggccggcttttatatcataacctcatttagaactcagtcacccccacttttattttttttgagacggagtcttgctctgttgcccaggctggagtgcagtggtgcggtcttggctcactgcaacctccctctcctgggttcaagcgattctcctgcctcagcctccccaatagctgggatcacagggacatgccaccacgcccagctaatttttgtatttttggtagagatggggtttcaccttgttggccaggctggtcttgaactcctgacctcaagtgatccacccacctcggcccccgaaagtgctgggattacaggtgtgagccaccgtgcctggccgtcaccccccattttctagaggccgaagaggagcatcggagatcagcagtgaggatgccccgtgcacgcttgatggggctggaattcacgccagctggtttttttttttttttttccatggtgcagctcaactccggccgtctctagccgagcagcacacgtagtaggtgactcgcaggcctgaggagtttggtgtaaaagtgaggccgctggctgctcggggtagggaggaggagggcggtggagcttctctgcagcagtcattgcagaggacaccatgtatatcttggtggcatcctcaggtcagcgagtcgggtgtccatcggccccacgtggctggcatacacggccggagcaacgacggagcgtactccctagtcctggcggggggctatgaggatgatgtggtgagtgtgtgtgtgggaggggtgggggagggttgctctagttttttggatggtggtaaaatacatagaacaaaatttcccatcctagccgtttttaaatgcttggttcccggtggcgtgaagtatattcccattgctatgcaaccatcaccaccaccatctccagaactttctcatcttcccaaactgaaacgttgtctccacgaagcactcactccccaccccctcccagtccctggcaccgcccaacctggttcctgcctctgtgactctgacgactctggagacctcctgggagtggaatcgcacggcctgcgtccttgcatgcctggctcctctcactgagcccgacgtccttgctttgtccatgttgtcgcatgtgtccggattccccttttgttcacggctgagtcctattctgccgtgcggagggaccatgctgtgttgatctgtctgtccgtgggcactggggttccttcccctttcgactgctgtgaatagatctgctacgaacacggctgtacaagtatctccagcccccgttttccattcttttgggtgtatatccagaagtggaattcaagactcctgtgataattccatgttgagtgttgttttttttttttcttttttttgagaccgagtctcattctggctggagtgcagtggtgtgatcacagctcactacagccactacctcctgggctctagtgatcctcccatgtcagcctcccaagaagctgggactacaggcaggcactgccacgccaaactaatttttgtatttttttgtggtgatggggtttcgccatgttgcccaggctgatctcgaactcctgggcttaagcgatcctcccgctgcagcctcccaaagtgctgggattacgggtgtgagccaccatgcccagccctctgtttaagtttcttgaggacgcaccacactgtttgtatagtcgctttgccattctgtagtcccaccaacagtttacaaagggctccaatttccccacattctcaccaacgcttgttattttctgtttctttgaaagtagccatcctggggagtttgctttcaatgcagtctctttttttttttttgcctctgcagagggttcacccagccttcttgtctgtttcaggaccatgggaattttttcacatacacgggtagtggtggtcgagatctttccggcaacaagaggaccgcggaacagtcttgtgatcagaaactcaccaacaccaacaggtttgtggaatcagccttcttatttccttgctgatgcatatctgccgagtcttggttctgttttgggcctcatgtccagcaagtgatagtctcatt[134 bp omitted]cagatggatgaaagcaaacttccctataaaaggccagataatagatatctttttttttttttttttttttttttttttgggcagagtctcgctctgttgcccaggctagagtgcagtggtgcactctctgctcactgcaacctctgcctcctgggctcaagcgattctcatgcctcagcctcctgagtagctgggattacaggtgcttgccacctcgcctggctaatttttgtatttttagtagagatggggttttgccatgttggccaggctggtctcgaactcctgacctcaggtgatcttccctcctcggcctcccaatattggtattacaggcatgagccactgcgcctggctgatagtaggtatcttaatgctgggcctggtggctcacgcctgtaattctcgcgcttcaggaggccgaggctcgaggataccttgagttcaggagttcaagaccagcctgggcaaggtagtgagacaacccatctacaaaaagtaaaaataaaaaaattagctgggtgtgttagcatgtgcctatagtcacagctagtcaggaggctgaggcaggaggatcacttgagcccaggaggttgaggccgcagtgggctgagattgcaccactgcactccagcttgagcaacagactgagatcttgtcaaaaaaaaaaaaaaaaaaacccctccaaaatagattgcttcagctatgcaggtcacacagtctattcagagaacctcttcagctcttgtgtcgtagcacaaaatcagccatagaccatatgtaagtgagtgagcatggctgtgtttcagtgaattttatttgcaaaagtatgtgataggccagaatttgcttggcccctgattacaggatgggggcggacttttccagcataaaaaccatcataaagcccaaaggaaaagacagatttgattatctaaacattataaatatattacataaataaatcctataaattaaaaggcagatgactaggaggagttcttgacatgacacatgatgatagtgtctt[136 bp omitted]cctggccaacatggtgaaaccctgtctctactaaaaatacaaaaattagctgggtgtggtggcaggcacctgtaatcccagctacttgggaggctgaggcagaattgcttgaacccaggaggcggaggatgcagtgagccgaaatcatgccattgcactcttgcactctagcctgggtaacaggagtgagactc[137 bp omitted]tggtgaaaccccatctctactaagaatacaaaaaaaaaaaaaaaaaaaaagcctggtatggtgacaagtgcctatagtcccagctactcgggaggctgaggcaggagaatgtcatgaacctgggaggcggagcttgcagtgagccaagattgctccactgcactccagcctgggtgacagagcaaaaaaaaaaaaagagaatatggaaataatgcacaaaagaagtgcaaagttgtaatcaaatacaaactgaggctgtggtgagatactatttgtttcccctataaagttggccaaaaattctaaaatgttgacataggtcaggggtaaaatagcattccactgttggtagaaatacaaattggaaccatctttctggaaatctcttctgcctgtttgtatgaagagctttataaatgatctattcttgtcactctaactccgctttgaaaaatgtctttaggagacctctggctaggtaaaaatgtaagatgtaatgtttttcataccattatctaaaacaattggcacatagacacacacacacacacacacacacacacacactctcacaaagtcagtaactaagtacctaaaaaagacatgggccatgggtggtgtgtcacatgcctgtcgttccagtactttgggaggctgaggtgggaggattgcttgaggctaggagtttgagacctacttgtgcaacataaaattatgaaaaattaaaattacaaaaaagaatttcaaaaaagttagctggttatggtcgtgtgggcctatagtcccagcttgggagccggaggtgggaggatggcttgagcccaggaggctgcagtgagtaaggcgtgatcatgccattgcattccagcctgggtgacagagtgagacaccctttctctttttgtttgttttttttttatatgtgtgtgtgctttgttttgttttttttgaggcagggtctccctctcttgtccagggtggagtgcagcagtgtgatcgtagctcattgtagcctccacctccttgggctccactgatcctcccacctcagcctccagagtagctgggactataggtgcatgttaccacgcctggctatttttttttttttttgtggagatggggttttgccacgttggccaggctggtcttgaactcctgggctcaggcaatcctcctgccttggcctcccagagtactgggattagaggcgtgagccacggcacctagcaaccctgtctcaaataaatagtaggctgggtgtggcctattttataaattatacatatataactttgaaatattaaatttttttttttttttgagacagaacctcactctgtcacccaggctggagtgcagtggcataatctcggctcactgcaacctctgcctcccagactcaagcgattctcctgcctcagcctcctgagtagctggaattacaggcacgcgccaccacgcccggctaacttttgcatttttagcagagacggggtttcaccatgttggccaggctggtctcgaactcctgacttcaggcgatctgcctacttcagcctcccaaagtgctgggattacaggcctgagccaccactcccggctcctgtgtttccttttttggggggtacatcctcacctataatgcgtggggtcctgactctccctgcagggcgctggctctcaactgctttgctcccatcaatgaccaagaaggggccgaggccaaggactggcggtcggggaagccggtcagggtggtgcgcaatgtcaagggtggcaagaatagcaagtacgcccccgctgagggcaaccgctacgatggcatctacaaggtgagtgccccttgaggaggccgggggctctgtccccgccggggctgcctctgatggagctgacgctgatgcccgctctctgcaggttgtgaaatactggcccgagaaggggaagtccgggtttctcgtgtggcgctaccttctgcggagggacgatgatgagcctggcccttggacgaaggaggggaaggaccggatcaagaagctggggctgaccatgcaggtgtgtctgggatgggggatggcactttgggaggccaaggcggatggatcacttacgttaggagttcaagaccagcctggccaacatggtgaaacctcatctctactaaaaatacaaaaattagctgggtatggtggcgggtgcctgtaatcccagctactgaggtggctgaggcaggagaattgcttgaacccagaaggtggaggttataatgagctgagattgcgccactgcactgcagcctgggtgacagaatgagagtccatctcaaaacaggagcactgccgggctccatgacggctctgacacttcccgcctgggcaccatgtgtcctgcttggaggctgtcatccttgaaggtcattgtgggtcacagaatgggccctgcctgggcttgtggtgctcatgttctggaccgcgctgaacactccaggaggcctcccgtctcgggcccatgcttccctggtttctctctgatccagaataatttccagggccccagctgatggcacccccctagctgtcccatataaatcctccagccagggggtgatgggaacgcgcagatgacatttgcttctccgcctgccgcatctcagagttgaaaaccagacttgcttgtcttcgttctgttggtaaagggatcgctgcagaccagtcaggcatctggtgtcttctgttttcacttcttggctcatcacaaaaaaaaaaaaaaaaaagcagaaacaaaccaaccaaattggtggattccagagagatctggacggaaaaatggggaagatgaatatccccgagccatctctcacctccctgtggcgatgggaactgccgagaacttactcaacaagcggcgcagcatttcagcaccagttaggatgtggtctgtccattgcagggagaagctttacagcagacgaatcgtgagactatttaaggaatcttaattgctgtcgagagcctgatgtcctctacccgagggggtcactcaggttgtcttttgaatggatttgtacggtggggaatttcagaagctgaggaagtagagagaaaaatagtaatgggagagacagcctcagcttctgttgggagtaggattttttttgtttgtttgttttgagatggagtcttgctctgtcgcccaggctggagtgcagtggtgggatctcggctctctgcaacctctgcctcccaggttcaagccatactcctgcctca[134 bp omitted]ctgcctcccaaagtgctgggattacaggcgtaagccaccgctcccagcctttttttttttttttttttggagacagagtctcactctgtcgcccaggctggagtgcaggcatgatctcggctcattgcaacctccacctcccaggctcaagcgactctctcatctcagcctcctgcatagctgggatcacaggtgtgtaccaccatgcccagctatttttgtatttctagtagagacggggtttcgccatgttggccaggctggtgacctcaggtgatccacctgcttccacctcccaaagtgctgggattacaggtgtgagccgctgaccctggccaggattttttttttttttatgactctcatctccattgtaacataaagaatgtgaaaggagctcaaagatttcctgagacactggagagtcagacgtgacttataggtaccttcgaaatggagcgatgatgccctgtgaggacagagagggcccgagtcctcagaatcaccagagtttggccagctaaggccctggggtcaggtgttcgtaagtgaagtttctggggaaacagtcatgctcattcactgaagtagcctgctctcagcgcttgcagtccagacccataaggcttgaaaacattcaccctagggtccctggaagcaaaagtttgcctgccctcatggaaatcgtaaagacaacgagatcttattggtgggatgtgatgctgaacacgtcacccgcgttcgctcacattaaatgcgcttaccccgaccctgccaggtggagcttggccgattatctcctcttagtctcctcttgttcgtagtgaagctttgcgattagacaggattagccattggtcgaggctccacagttaacgaagagctgaatgcacaggcgtcccccccttaccagggggacacttcgaaggtcctcagcacatgcttgaaaccagagagtaccaaaccgttgatgtataattttttttccatacgtttggactggtgattaagtttaatctataaattaggcacagtatgagattcacaacctctctttcgcatcttaggcttctctttagcatttccaaattgtcagcatccctactcttgcactttggggccattatttttatttttgagaccaggtctcgctctgttgtccaggctggagtgtagtggtgtgatcatagctcactacagcctcaaactcctgggctcaagtgattctcctgcctcaggctcctaagtagctgggactacagatgcacaccaccaggctcggctaattttttaaatttttttgtagagaggggatcttgctatgttgcccaggctggtctcaaactcctgggctcaagcgatccccctgccttggcttcccaaagtgttgggcttatttaataaaaattagaatgtttaatattaatattttatatttagcctgtaatcccagcattttggatgactgaggcaggtggatcacttgaggtcaggagttcaagaccagcctggccaacatggtgaagccccatctctactaaaaatacaaaaattagctgggtgtggtggcgggcacctgtaatcccagctactcgggaggctgaggcaggagaatcgagaagctggacaaagggaaggttcacatccctgtgggacgatgcaatgtttcatcatgcagtgtgcgtgatgtgaggtggctgtaaagggggaggaaggggccccgagccgagggatgcagcgcctctagacgttggacacttagaacagtgtgcagtttacaacttaggaattgtttctagaatatttcatgtaacattttcagttgactttgggtcactgaaacctcagcaaaactagataagggaggactaccctgtgctcttcagggggattgggggtcaggtgtgtctggaaacccagacctggcaaggaggctggaagagcgggctctgcatagcgtgtgggccccaagcctgactcacggctgtccctcttcctcctgaagtatccagaaggctacctggaagccctggccaaccgagagcgagagaaggagaacagcaagagggaggaggaggagcagcaggaggggggcttcgcgtcccccaggacgggcaagggcaagtggaagcggaagtcggcaggtgagaatctcgtgggtgtggggtgagcgtcttgtgtgtgggggagcaggtgggcatctcgcgggtgtggggttgaggtcgtgtggacgtgggagccggtggctgtctctccggcagctcgggccacgcgcccctccctcacgcgccccaccctcttccaggaggtggcccgagcagggccgggtccccgcgccggacatccaagaaaaccaaggtggagccctacagtctcacggcccagcagagcagcctcatcagagaggacaagagcaacgccaagctgtggaatgaggtcctggcgtcactcaaggaccggccggcgagcggcagcccggtaggctcgcacggctcactcgtcgccctgatttgcgttgactgcggtaaaatgtgtggggcttgtttcccatgttccccattttcaagtgtacagctcagtcgcactgagtacattcttgtggttgtgcaaccatcaccaccatcaccacctccagaactttatcctctccccagactgaaaccctggccctgaaactgtcactcccaccccctcccaagccttggcactcgctccccagccccggcaactgctccccagcccctgcacccgctccccagctccggcaccccctgccatcctaccttctgtctctgtctcccggggctgttgcaaagtgaccccaagcctaggagtgcaaagcgactcacatctcacagctctggggctgggagcccgacatgggccttgctgggctaaagtcagggcagggatagggctgggccctcctgggggctccaggggagaaccagatttctgcctttcccaaggtctagaggcactgtatccctcggctcggggccccttcctccccctttacagccacagcgcatcttcttccagtctctgagtctcactctcccgccctctctcgggaggacctcggggtgacatcaggccccccgcctcacccaggatgctttcccagctccaggtccttcactcagtcccacctgccatttctcctctgctgtggatggtgacgtctcaggatggtgcaggtctcaggattcagctgtggccgaggccatctcagtggtccctctcttcccatttccttcaggccacattcttcccagggctttctccccagctcccaccctacgctggggcagccccttgcccctagaccttcacttgtgtctctttggtccccgcacttagctccaagcaggaggaggtgtctttcgagtcatccgaggctgggctcctggtggcccgtgtactcagtatgcattgtgtcagtggacaccatgcctctaaatttttttggtgacaggagctcaccctgtcacccaggctggagtgcggtggcatggacaaaggtcactgcctccttgaactcccaactcccaggccacgcctatgtttttaatttattttgtttatttttattatttttttttgagatggagttttgctctcgttgcccgggctggagtgtgcaatggcatgatcttggatcactgcaacctccaccttccaggttcaagtgagtctcctgtctcagcctcccaagtacctgggattacaggcacccaccacgcctggctaatcttgtatttttagtagggatgggatttcaccgtgttggtcaggctggtctcgaactcctgaccttaggtgatctgctcacctcagcctcccaaagtactgggattacaggcgtgagccaccatgcccggcctattttttaattttttgtagagatgggggtctcactgtattgccgggctggtcttgaacacctggctcaagcgatcctcttgtcttggccttccaaagttctgggatgacaggcgtgagctgccgctcccagccaggaacctctcctaaagccctgtcttgactcagtgcagggtgtgcttggtggtgccagctggtcatatctgggtcctgcccagcatcattgaggctggcgcccttgtactggctccgcctcatcctccccaccttgccacttggggtgttggggacttcaggtgaggctcatgcctgttgggcctctgtttttctcagaacggggacgatcatggcccccgcctcctggagtgaaggctggggacagaattagaggacccaggtacatgctcagcaggaagccactgatctgtgggagccctggtcccggtgtctttgccggcctcacacccgcttccctctagttccagttgttcctgagtaaagtggaggagacgttccagtgtatctgctgtcaggagctggtgttccggcccatcacgaccgtgtgccagcacaacgtgtgcaaggtgagtagagatggccgcgggagccgggtggaaggttctggaaggatgacctgacctcccgttcccacatgcctgccactacagacagaggcttgttggctttgctccgctcactctgcagcttttctcggggccctgttgactgctttctgggcagcctgtattaccacggaggcctataacattctcccccaagtcctgtatggtcaaggggccagggtgggagaggatgggccacagtcttggcctaaggtctggagaggaggtgcacatcccctaggggtcaggaaagaaggcttcttggaggaggtggtgttaccaggcagcatcccttgtacctgggacagcaggtgaagaagcctgggtgggaagtcagcagctggggcctgcagtggctctgggcactggggtggtggcctgccatgggctttaaactcaggacaagtggtcagtcgtaggagggacacaagatcccagctgatggtttttttttttttttttttttttttttctgag[133 bp omitted]cgtgcccggctaattttttgtatttttagtagagatggggtttcaccgtgttagccaggatggtttcgatctcctgaccttgtcatccacccgccttggcctcccaaagtgctgggattacaggtgtaagccaccgcgcccaccccgcagctgatggttttcaaaccgattggtttggggccaggacagggtctcttcccccctgtgctgtgggccttggggctggatcattgtctggggtggggccgtcctgggcactgcagggtgctgagcagcatccccggcccccacccactccatgccaggagctccctgcctagtcgagacaatcacagacatccccagacaccttccagtgtcccctgggggcagaactgcccaggtgggcagtgtgggtctgggtgatggtttctctgctgcaacctctggccagagccggcagtcccggtggacaggtgtggaagggactgaccctgccaccccacggatctccccaggcttctgagttgctggcggttttccttccaactgcagtcccgcagtcctctcagccatgggccacacccccgggtctcagaccccgtgtttgttttcatgccaggaggcagctcagggaaggtcaggagatggggtgttcccagtcatgcccatggcatctctgcctcctcgggccccacctgcctcgccctgtggcctgagtcccttcagctgtgtgggcctccctgagtgccctgagtgaggtggcagaaggggtgagaggccatggtgtctttggggctggtggtccgggtctggccatctgtcacctctcaggcgtgcaggcactaatccctccaagcctcagttggccacagtgagaaggggcctggtaacactgtcctggatgccaggttgttgtgaaggtcccggcttagcctctggcaggaaggaggtgctcaggaggtgggcacaggcagagggctggctgtggggggctattggaagagggaggcctgggagccccgtggcggtaggaaggactgtggggacattggaaaccatctgtcctgtgcatcggtgtgaaggcgcggaagcgctgaggatgtgaaggaaggggctaaccagcatcacggtgtccccacaatctgtccttgttgctctgttccaacttgggaagctcagcatcggaggggttctgggaaacaggctgtgaccttccaccttgatctttttaaattataaacttgaggccagccgtggtggctaatgcctgtaatcccagcacttggggaggctgaggtgggaggatcacttgaggtcaggagtttgagaccagcccgggcaacatggtgaaaccccatctctactaaaaattaaaacaaaattagctgggtgaggtgacaggtgctactcaggagactgaggtggtagaatcgcttgaacctgggaggtacaggttgcggtgagctgagatcgcgccattgtactccagcctgggcgtcagagcaagattctgtctcaaaaaaaaaaaaaaaaaattgaaaaaaacattcagagacagcatctcactctgtcgcccaggctggagtgcagtggtgccatcatagctcatcgcagccttgaactcctcgcggggctaaagagatcctcctgccttagcctcctgagtagctggggctacaggcatacaccaccatggccaacatgatgaaaccctgtctctactaaaaatacaaaaattagccaggtgtgctggtgggcgcctgtaatcccagctactcaggaggctgagac[139 bp omitted]tgactgtgctgtggtcaccaggcctctcccccatgtggtcaccgccctcgcccagctgtgtgacgacatgctgcagacatgtgccccctgcgtaggcatctgtgcacctgtgtacggcgtgtcactcctccctggcgtgcagccagcccggtggcatcttccctgtttgtctgcttgggaagtggagactccaggcctctcagctctgtcttctcctggctttcttccccaggcacgacttggttgattgagcttgaagttaggaatctgaatccaccagacttggttccttcctccttttcccctttcttctcattgacgtgtatgtttattttttatttttttcgagacaaggtcttgctttgtcgctcaggctggagtgcaatggcgtgatcatggctcactgcagcctcagcctgcctccctgggttcaggtgatcctcccacttcagcctccggagtagccacgcccggctaatttttttgtttttgttttttctttgagacgcagagtcttgccctgtcacccaggctggagtgcaatggcgtgatctcagctcactgcaacctccgcctcccgggttcaagccattctcttgccttagcctcccaggtagctgggattacaggcatgtgcctggctaatttttgtatttttagtagagacagggtttcaccatgttggccaggctggtcttgaactcctgacctcaagtgatctgcccccctcggcctcccagagtgctgggattacaggcatgagccacgatgcttggcctgatgtgtgtgtttattaagcatctactgtatacactgtgcttggtgttgagagagaacacagcctcaaagctcagggagcatctgccctgttgtagataagataagcacattaataatatataacacggctccacaggtggaaggagaggtgccgtcttgaaggcagatggggtgaggggatgggactgcctctagggaggtgtcagggaaggccccataagggaggtgacttgagctgagctgtgagtgatgagagccgggggaccgagctgttaagctgcatgacctgccagggacaaaagcctggaggccgggtgagcttggaatctttgagggcccctaggggggccaggctggtgatgggcagcaggtggaaagtgagactgaaggtcagaggggcctctggacctggtgagactgtccccacagtcctgggagaggtggccaggagcaaacctgatggtgtggatggcacttctcacgcgcctgctgtgtcttacaggactgcctggacagatcctttcgggcacaggtgttcagctgccctgcctgccgctacgacctgggccgcagctatgccatgcaggtgaaccagcctctgcagaccgtcctcaaccagctcttccccggctacggcaatggccggtgatctccaagcacttctcgacaggcgttttgctgaaaacgtgtcggagggctcgttcatcggcactgattttgttcttagtgggcttaacttaaacaggtagtgtttcctccgttccctaaaaaggtttgtcttcctttttttttttatttttatttttcaaatctatacattttcaggaatttatgtattctggctaaaagttggacttctcagtattgtgtttagttctttgaaaacataaaagcctgcaatttctcgacaaaacaacacaagattttttaaagatggaatcagaaactacgtggtgtggaggctgttgatgtttctggtgtcaagttctcagaagttgctgccaccaactctttaagaaggcgacaggatcagtccttctctcgggttctggcccccaaggtcagagcaagcatcttcctgacagcattttgtcatctaaagtccagtgacatggttccccgtggtggcccgtggcagcccgtggcatggcgtggctcagctgtctgttgaagttgttgcaaggaaaagaggaaacatctcgggcctagttcaaacctttgcctcaaagccatcccccaccagactgcttagcgtctgagatccgcgtgaaaagtcctctgcccacgagagcagggagttggggccacgcagaaatggcctcaaggggactctgctccacgtggggccaggcgtgtgactgacgctgtccgacgaaggcggccacggacggacgccagcacacgaagtcacgtgcaagtgcctttgattcgttccttctttctaaagacgacagtctttgttgttagcactgaattattgaaaatgtcaaccagattctagaaactgcggtcatccagttcttcctgacaccggatgggtgcttgggaaccgtttgagccttatagatcatttacattcaatttttttaactcagcaagtgagaacttacaagagggtttttttaaaatttttttttctcttaatgaacacattttctaaatgaattttttttgtagttactgtatatgtaccaagaaagatataacgttagggtttggttgtttttgtttttgtattttttttcttttgaaagggtttgttaatttttctaattttaccaaagtttgcagcctatacctcaataaaacagggatattttaaatcacatacctgcagacaaactggagcaatgttatttttaaagggtttttttcacctccttattcttagattattaatgtattagggaagaatgagacaattttgtgtaggctttttctaaagtccagtactttgtccagattttagattctcagaataaatgtttttcacagatagacttgattgtgtcttcctatttgcaaactgcctttggagctttctgtctacttttgtgcactattttacaaaaatcccaggagaaacatgaggcaggtggcttcagccccactttacagatgagaaaactgagacccaggagatgacggtgacgggctgaggtcctaaccgcagcctgggaggtgctgggctgttcactttgcagcgtcaagttgcaggggtcagcaaacgacagccaatgggacccaagtcaggacactgcctgtctgtaaataaagttttattgacaccaccacacccatttctttatgtatatagtggcgtttacgctaccatcagcagaactgagtaggtacagcagaaaccatctggaccacaaagctgaaaaatactcactgcctggccagcaaagcttgctggtctcttctcttgggaggatgacttgagtgtaggagtctgagaccagcctgtagaccccaactctacaaataaataaaaatattagccaggtgtggtggtgtgtttctgtagtcccagctactcaggaggttgaggcaggaggctgattgcttgagccccagagctagaggctgcagtgaactttgattgcaccacggtactccagcctgggcaacagaatgagatgctgtctttaaaaacgttttaaaaaaaaaaaatcgggacggtaaaggggctgcgtcttgcagattaattaattcacatcaacctattactggtgccttttattgatggttaagtaaccatatgggcagatttgttttgtttttgagacagtcttgccctgttgtccaggctggagtgcaatggtgtgatcacagctcattgcagcctccaactcctgggctcaagtgatcctcccatctcagcctcccgagtagctggtaccacaggcatgcagcaccataactggcaaatttaatttttttttttttttttttggagagacgggatctcattctgttgcccaggctggtctccaactcctgtgattaggcgatcctcccatctcagcctcccaaagtgctgggattacagacgtgagccaccacgtgcagcctggagtttctttttgaggtggtaaaaatgttctaaaattgatggttgcacatgtctgtggatatactaaaatccacagaattgtgcactttattttttatttttattttttcctttttttttttttgagacggagtcttgctctgttgcccaggctggagtgcagtggcgtgatctcggctcactgcaagctccgcctcccgggttcacgccattcttctgcctcagcctcccaagtagctgggactacaggtgcccgccaccacacccg[180 bp omitted]ttataccagaaatatgtcaagtgtgaacgtgaagataagattcccagttcttgaaggaaactccataaatgtccccagtgggcccttcctagaaaacactaaagtgggttcattgttgagattgctgccttctttttgatttttctctccctttaaagaacaatgtcatgtttaaaaaaatgagcaaaacccagaaaagtatttgtggaactgttttgccaccgactctaatcttgggcatatttctttcctggttcacttaaaaaaatttctttggccgggtgcgatggctcacacctgtaatcgcagcactttaggaggctgaggtgggcggatcacctgaggtcaggagtttgagaccagcctgtccaacatggtgaaaccccatctctactaaaaatacaaaaataagctgggcatgatggtatgaacctgcaatcccagctacttgggaggctgagacaggagaatcgcttgaacccaggag[144 bp omitted]gtgtcatcatagctcactgcagcctcaaactcccatgcgcaagcaatcctcctgcctcagcctcctgagtagctgggactactacaggtgcaaaccaccatgcctggctacttttttaaagagagagatatatattttagtagagagaagtctcactttgttgcccaggctggtctggaactcctggtctcaagccatcttcctgtctgggtctcccaaagtgctgggattacagatgtgaactaccatgcccaccctaaaaatctttaacagctctatggagataacagttcaggtaatataaaggtcacccttttaaagcatacagttcagtggttttattttactgtgttgtttttgagacagtctcgctctgtggcccaggctggagtgcagtggcaagatctctgcttactgcaacctccccctcccgagttcaagtgattcttctgcctcggcctcccaagtagctgggattacaggcatgcaccaccatgcccgcctaattttcatatttttagtagagacagggtttcaccatgttggtcaggctggtctcgaactcccgacctcaggtgatccactcgcctcggcctcccaaagtgttgggattactggtgtgagccaccatgcctggccagcttagtggttttagtatagtcaatacagttatgcagccatcaccaccatctaattacagaactttaacatccacacaaaaagaaacctcacacccttccgcagtcttgccctgtgtccctcccccaggccctgcaagccacgaatcctctttctatccttatggatttgcctgtcctggacatttcatataaatggaattatactgtattttgtgtctggcttctgtcactaaggatggaattttcgaggttcatctgcattgtagcctgtgtcagagctttattccttttcatggctgagtaatattccactgtacggatgggccacctttctataatccccgtttgacttgttttaagatgtagtcttgctctgttgcccaggctggagtgcagtggcataatctcggctctacaacctccacctcctgggttcaagtgattctcctgcctcagcctccggagtagttgggattacaggtgtgcaccaccatgcctggctaatttttttgtatttttggtagagacggtgtttcaccatgtt[133 bp omitted]ggcccaggctggagtgcagtggtgtaatctcagctcactgcagctgcctcctcctggattcaagcaattctcgggcttcccctctctagtagatgggactacaggcatgcaccaccacacctggccgatttttgtactttttgtagagatggggtttttgccatgttggccaggctggtctcgaactcccgggctcaagtgatcctcctgcctcagcctcccaaagtgctgggattacagccactgcacctggcctcccatttcaatttgttaatgcagcagaccaacccataaggggaggggcatctattgaagcattgaacatttttgcgctccacaccttgcctgtctagaaagattgagggagaccagtcagaaattgagcattgggcctgctaactgggggttccttgacgtctgaaagccaagccaagcctcctggtcttgtttagggggaggtccccaagcattccctgccccagtcctttgtgagatttgcatctgactgcaaaggatggaagaaaaccagggcaattaggtgagtgttgcctaaattaatctgcccattaaaatattctaaagagcatttccttcctttttggaggatgaggacttctacttatctgacagcaattctagtgtgtttttaacattttaatatgaagagtttccaaaacttggaaagaatcggatttggaaagaatcggatggtgaaccctcagacctaccgtctagattctatgatcatgttaagtttttctcataagagatggcatgaaaactttgtctaagcaaaataaagtggagaacccatttgggttcctcggttaaaaacatttatattgtctgtgaaatctaaacaccccccactgtctcagagaatatacttggaagtagaacaaaaagccctatgtatgtggtacgtggggtggggactctttcccttcatgattgcacttttttttttttttgagacagggtctcattctgttgcccaggagtgcagtggtgtgatcatggctcactgcagcctcgacctcctgggctcaagtgatcctccctcagcccccagtgtagctgggaccacaggcatgtgcccgcacaatcaactcggtttttatttttagtagagaagaggtctcgctctgttgcccaggctggcctgaaactcctgggatcaagtgatcctcccaccttggcctcccaaagggctgggattacagatgtgagtcactacacccagcctgggcaacagcctgtttttaaattttgtttttactttttattttgagacggggtttgactctgtcacccaggctggagtgcagtggtgtaatcaacggctcactgcagcctccacttccccgggctcaggtgatcctttcgcctcagcccccgaatagctgggattataggcgcgtgtcaccacgcccaacttttgtaatttttttggtagagacggagtcttgctatattgcccagcctgttctcaaactcgtgggctcaagtgatctgcccatctcagcctcccaaagtgctgcgattccaggcatgacctgaaattaaatctcaactccatgtggaatatatgaatatggtcccataagaatttaaaacacccagagcttcttaaattctcctttgacttctctttttaccagtgtgcagctttccttctctccccaaggattaagttcgtttcttcagtttaggagtacctttttctgtgcattgacaagcttgtgtgctcttaacctcatgataccggtttctgtgtgtgtttccatatttattttattgagtacaggattctggaccactgtccctagctcagcggttgggagatatttcatgtttgcaaacagatcggccttctcttttttcttttctttccttttttgagacagagtctcaccctgttgcccaggctgaagtgcagtgatctcgactcactgcaacctccgcctcagcctctggagtagctgggattacaggcatgcgccaccatgcctggctaattttgtatttgttaatagagacaggtttttgccatgttggccaggctggtctcgaactctggacctcaggtgttccacccgactcgacctcccaaagtgctgggattacaggtgtgagtcgcccgagccacagcaccgggcctggcctccttttcaattgctacatagtaagtattccagagtactgattgctattaagttacttctctaatcccccactgatggatagttagtgcaaaacattggaaacagttgcagacagccctgccgccggcattcttgaattgtgtaagctccagaccttttttctgggtacatcacctccaggaagaactgctggctgggttatcgggtggtggatgcacttagaatgttattagaaaatgtcaaattgcccaatttacactcctgccactccaaatgggggcatgcctcacacccctgcgtggtccagtacacaatgaatgctcattttgtgaagtcacagggtcaaatctttctccgtgcctcatcccacttaatccttgcaacattctcaagaggcgggtagacggggtgtggccactaccatcatatccattgcacagttggaaacagactcagcgaggttactttgctggaggtcaaccacagtgaggcatggggcccggcttagctttgaatccaggtcagaaagcaccaaagctcattctctcccatacattttagggaactcggggagagggaccctaactattccgaaggccttgccccttggcaaaggtttgttgattgtgatgggaatagacctacggtggcggggtggaggctcttgctgctttaccctatgttctcggttctcctcctttgcaaaacggatcgctatgtctccttgcttggcactttgcaaattggggaacgctaagcccacattccggccacgggtttcgaacctccagcctgcacgttcccggccggtgctgatgctgtgctgggtctcacgtactcagccgccgcctgataaccagggcggggcccggagcttgcgggcagtgattggcacctgccccagcctgtccgcgcctcgggctggcccctcaagccaatactggctcctctctgtgcggtcgtcgggcgggccctgaggctcccttgtcaatccaaggcccagctgccgtcgggttggtcgcggcagccttggctggcgtgcgccccctccaatgagaacagagccggtcagcgggcacgtgggtgggcgccggcgtgtccccgccggtctgccaatgaagaggcgaggccggcgtttgtccccgcccaatcgcggcgcgcggtgggcgggccgtgcggtgttgatgggcccggcggaggggaggggcggagctgtcagctccggccaatgggcgctcgggcgtggatccggcagccaatggcagtcggggcggagctggcgcgcggccttataagcccccccgcgagcgcttgcggagggctcggtcgccagcaaccgagcggggcccggcccgagcggggcctgggggtgcgacgccgagggcgggggagagcgcgccgctgctcccggaccgggccgcgcacgccgcctcaggtgagcccacggggaggccgcccggccgtgtccgagcgcggaccccgccgccatggccgcccccgcgtcgcggctcggggctgcgggcgcgcccgggactcgaggcccaggcctcgggcgcggcctgctcgggccgggcctcgcgctttgtccgggccggcggggcggttggggcgttaaccgcccggcccgggggcgcccgctggttttcgggcgggggcggcggggccggacaatggcggggcgcgcccaggggcgggagcgggggccccttcccgggccgggggcgcgcgggggctgggcacagacggccccggcgccccgcacaaaagatgacagcgtgggtggccccggccgggcccttttatcacccgggacaagcctcggcctattattattattatttttgaaagaaagcaagaaaaaggaaaaagaccccagcccctgggtaacccccgcctgcgtttctggccctttgggcgccaggggggctaaggggaagccccccagctggacacccagggatgccccctaaatgcctatcattgctcctgcactgcccccacctccggtcaacctgctatgccttggtagcttccaaacttgcccccctgtacgtacccgaaacccccaccccgccataagcatatgcaatctggattttagaaaaaaatcatcttgctatgcaacggcagcctccacgagtctctccgtccctcccccttccagcctgatcgccatctcgaacgaagcccctgctctagagaaatgaattgaggagttgcttccgccgagaccccttttctgtgtcccccgtggacatccccctgggagctggggacggactcgctctgaaatctgcttgacctggggtctgccagggcccaggtctgcgctcagtggtggccatgacaatcaggcaggacgggggactctgtccacctgggcacggtggaaggttttaaggggcatgttttccgcccctgggggcagtggaggcatggactgcttttgggtgcatcccatctgtttgcttgggggaggatgcttctgttttaataatttaccagcaccctgtgaggaagtgttccccgagttgtgaaactagtgagaaggtggttcagctccgtggagcctagtgatcctgtcatatgtgaagagcgtctttttccatgtgtttctggctggggcgtgtattcagcaagttcctttgggtcccaccgggtgcctgcactgtcttgggatctctggatactggactgaattcaagggatcggtgccctgccccagtcctctgcctcaatggccatttatcagaatgtccccgggctggagaatgctcctaaaaacagcaccagtcctaaagcaggctcattagacgactcctatgggcttttatcactgccgttatgggagctaatgactcccctaattctccaataatagcttccttatgagccaccaggagggtttgtcaacacacggggtcagccttctcctgcagcccctgctgaagcagtgggcatcctctctccgctttgcagtttatgttttgaaaccctgaaggtcggagcgtaaagccgtggtagagtcaacttctgtctgagccgaggatttctgggacttgccagcctcgtctccgtgtgtctgattggacacctggcaggtccgggcgctccccctccttgagccggcgacaccaggacgggtcagactgtcctggcctagaggaggtcaccgctggggaggaaaagggggtaacggagattctgccgcacagacgggtgtctgtgtacaggctgttttggtggaagcgtctactgtgtcaggagctgcgggtgcctgcgtgtgcacgtgtgtgtttagttgctgagacctgaaatatatatgtcttagtaacaatccgtttgctcgcattttctaaccctttcctctttggggagggggctgctaacaagatgttaactgctggcgcttaaaggtatagctgatcagccaccgcacagcaccccgcctggcctttgttgtacttttctgtctcgtggaagagacccttcctcagcctcctgccctgtcttcagtccctgtcccgtcctgcaggagccctctggggtggccaggggccgtcctctgtgtccttctctcccacctgaccactctgcctgtactttaattcctaatttctctgtctcctctgctggtttcctgcccgtttgtcctatgccccacccactccctgatgagccggggaggagcctcagctctggggaagccatctgtcctcggttccatctgacacctgtggggacgtgccttggggtcatgcgttcacctggtctggggctgctaggtttccagtgccgagtgccatgccgggacaggttgggaggagtccctggctcctgtgggtttagagtgtagtgggggaaagggtgagctggctgcccagggcctggtcacagctggaatggtggtgtgcagtccgctgccctcgggcccagctcagggagcaggcaggaggaggcgaggctgttgagggcctgaggtgcatttgtaggtggctttgttccctggatcggggagcggaattgggggttcagagctgggtgaccttgacccagtcacttgctcagtgacaaagcagatcgggggcactaaatctttcggagcccactgggcaggaggggacggagagcagatgaacagggtgggggctcggggcggggggagctccgcaggcctgcactggtcaccgccatgacagatcggccgtcctcatccacagcctcaccctaggctcctggctcagctccagggacctgccatgaggcagctcgatggggtcttcagatgccacagccctcccccttcctgccccaggggtctctgttcctggcttaggatgccggacagaagagcaggggcccagcctgggctccgttctcatctggtggtcttgacgacgtctctggatctctgccctctgtcccatgccccacacaggcttcagagttggagagacctggattcagatccctcctctgaggcagtcacttcccctctctgggccttgctttcttctctgtaaaatgggtgtaatgggaacacctccctcccaggtggttgtgaggatcaaagcgggtaaaaggcgctgaagcttgcagggtgccaggagctctgagttcggagccggtttattacacagcaaggccctctgccctgtcagggtctccccacctctgccctatccacgttctgggctgggacattctgtggcggggctgtcctgggcaccgtagggtgagtgtgaacaatatccctgaccaccacccaccagatgctagtagcaccctgtcccctaagcggtagcaaccaaaaatgtcccctgggaagcactgtcaaccccgcagtgagaaccttggacttggccttcagccctgcagtagctcatggtgtgctgtgaccgtgatgggcctcagctccctttctttcctccccactcaccctttagcagtgagtgactcctatttgcaaactgtgtcccggacacactcctcacctggttgttcaggttctccgtgactgtccttctgcccttccagggtggcagcttccacctgagaggacaggagcccccacggggtcccctgcacgccctgcaatgaggggcagcccggcatctgtggggtcttctgggctgctctctggcctctgagctccgggtcttcctgggctgctctttggcctctgagctttggcaggtccttgcccaggcttgcttggctgcccccaggggtggcacttccacaccctcccagtcaccatagccctgacctgtcgatttgccagacagttttctttaagtccatttaaaaatgactcacctctttgatcttggcctcttcctgaacagtaatgtccccagagttgtggaacgttaatgtgctagttgcacatacttttatttatttattttgagacagaatctcactctgtcacccaggctggagtacagtggctagatctcagctcactgcaacctccgcctcccgggttcaagtgattctctggcctcagcctcccgagtagctgggattacaggtgcccgccaccacaccctgctaacttttgtatttttagtagacacggggtttc[133 bp omitted]caaatgagcttaaccactatattaaaaaaaagaaaatttgtatcttcccaaatactgaggggggagtggattgacgaattgatgtttcttggtttttggacaaattaattttcaagctcactccctgcgtgactggcctgttctaggatgctggacttggttagatctgggtccgtctattccctcctgctcccttgaggagctcggaaaatggccttccctgttggggcggggaacatgggaagtctctacctcctgcttagttttgctgtgaacctaaaactgctctctgaaacaaagcatattaaaaaaaaaaaaaaaaaaaaactggctgggtgcggtggctcatgcctgtaatcccagcactttgggaggctgaggcgggcggatcacctgaggtcaggagttcgagaacagcctggccaacatggtgaaacctcgtctcttctaaaaataaaaaaattaactgggcgtggcggtgcacacctgtagtcccagctacttgggagactgagacaggagaattgcaccgagatcctgccactgcactccagcctgggtgacagggcaagactccgtctcaaaaaaataaataagtggccgggcgcagtggctcacgcctgtaaagccagcactttgggagccaaggcgggcagatcacaaggtcaggagatcgagaccatcctggctaacaccgtgaaaccccgtctctactaaaaatgcaaaaaaaattacccgggcatggtggtggccggtgcctgtagtcccagctactcgggaggctgaggcaggagaatggtgtgaacccgagaggcggagcttgcagtgagttgagatcgcgccactgtactccagcctgggcgacagagcgagactccatctcaaaaataaataaata[131 bp omitted]ggccaacatagtgaaatcccatctctacaaaaatacaaaaatcagccgggcatggtggtgggcgcctgtagtcccagctactcgggatgtgggggcacgagaatctctggaacctgggaggcagaggctgcagtgagccaagatcacaccactgcactccagtctgggagacagagcgagactctgtctccaaaaaaaaaaaaaagaaggtagtcaaaggagtaaaaaccaaaacaaacaaacaaacaaaagattttcccctgctcagaaccttccggtgacttcctgttgcccttgggaaaaattctgggccctttcgcgtggccccttcgctctgtcatctgtggccttgtccttccttcctttcctccctttcttcctcctgcacctgctcctttcctggcacagccgccttccctgcccgcccttccctgccgcaggacctgtgcacttgctgtgcccgctgcctggttctctttccacccagccggctccttatcactctagtcacttcccttccctacttctcctcctttgcatgtcacacgatcagagctgggtattagtctgtttgtgtatctgtttgtctcatctactagggcaggggctttttctggaagggccggagaataaatatttttggctttgtaagccagaggtcatctctgtccagaccactctgctttgccgttgtagcaagaaagctcccgtgggcgagtgtgcctgtgtttcagtaaaactttatttatggacacaaacgtgaattccgtgcaatttttacattataagacatttttcttcttttgctttttttttcctccaacgactaaaaaatgtcaaaaccattcttagactgcaggctgtacaaaaacaggtggcgggcaggattgaacctgtgggttgtagtttgcaaatacctggctagggtgtgagggccacactacggaaagctatggaaaccatgtcagcctcacgacccctagaatgtacggcagctccttagacgtggtgggtgttgagtggacattccttgttgagtgaatgaatttttttttttttttttgagacagagttttgctctgtggcccaggctggggcgcagtgggctgatctcggctcactgcaacctccacctcccggattcaagcgattctcctacttcagcctcttgagtagctgggattacaggtgcatgccaccacgctcgactaatttttgtatttttagtagagatgggattgcgccat[264 bp omitted]gaccaatatggagaaatcctgtctctactaaaaatacaaaattagttgggcgtggtggtgtatgcctgtaatcccagcttgttgggaggctgaggcaggagaatcgcttgaaccctggaggcaggggttgcagtgagctgagatcacgtcactgcactccagcctgggcgacaagagggaaactcagtctcaaaaaaaaaaaaaaaaaaggtcatgggtcatttcaaggatccttaaaactgcaggaatgtgagaaaatgcgatgctgacatccacccagacagcctcaccataaaggagggaaaaaacagctacaaacagtgtaggtggggggaacgcttcgctgtttgagacgccagactctcttgctctgggattcacgcggctgcctttctgttacagctcaccaagcgtcagaagcacgtcgagccgtgtactcggcccaaggagttcagtgtgacctggcaggaactgagggtttgtttaaaaggaagacagcattgcacaatttcacaaggcttttgttttgtaagcatcggaactctcctcgttaccagtgctagcgcccccgatgggaggggcaggggagtcgcagatggtggtttctgctgtccctgagcacagaaagcctcatgagggaggtggcttatccagtgcagagctcagctttgtagagtgagtggacaagtgcccgtcggtggccatcgtgcggtcagtagccgagtgggggactgtgcccggccacacttcctttgtctcactcttctcctggctgacaggcattttctgagccaagtaggtctttggcatcttagatttgggcctgtcccaggaacgttctgacttgtcaagaaatcgtaccgttaatttacggtcatgctttctttccttgattgaaataaacaatctggagaggcttgctcagaatttcttggctttcaaaagttgcctgtctttttttctttttctttttcttttctgttttttttttatttttgcttgccccctctctctccctgcttctctggctcttcctcccttccctctttcttttctttctttatccacctcagtgatctcagcaaacacgaggggatggatgacaagtttgcgtccagccatctccgccctgctggcaggctgtgcctctttggcggtggccgagcgcgaagttgctctgtggctctggactgggatcgtgtttgttcaatggacaaaggctgagaatcccgaggccgactgcccagtggctgctgcacctcaagaccccgagggctctcaggtgcacagtgacagtcactcacgcagacctggccccgtttgctggtaggcgcgaccaccgttgtgtttttcagacaagcctgggtgacttgctgtgaaaacgtcagctgagggcacggtggcaggatttccccctgcatagacctcccgtcagcattcatagctggacccaagtgctggcaccttccgagccgccggcagtggcggtgggcctgtttgcgtttttgcggctgccctagtctccagggagagagcgtggagacagacgatttgtatgagattagccggccgtggattcagaatcgctctttgtgtgatgggtcccaggggttccttttgaccacagagccagcctgaaactacccacgggtgctgtggaccccttgatcatggcgggatggaaatgggctgtgccctcagccgggactcaggactgcagcatgtctgggcagcagcctggaagctggccagcctcggcgcccttggggacagcccttgacactctggctcggtgccctgagtgagggggcgccaccctgggctccctgggatgcgagcaggacccaagccaggctgctggaccgggacagtcgcgtcatgttgctgttgtccccttcctgcagcatctccatactctcctaaaatcccatctgtcagacagtgttggctgtaggcagagcgggcctcctgtcttgcagtcgggccgcgtggatctgattgtcttgctcaggagagagagaagattgccgtccctagcatgcacttgagtcaagcctctggaatttcaactcctgctccctgctctattccaactgcttcccccaggaaggggggacgaggcggaggaagtcgttctcttgacacccctagaacataaggcatcttggccaggcacagtggctcacgcctgtcatcccagcactttgggaggctgaggagggtggatcacctggggtcaggagttcaagaccagcctggccaacgtggtgaaaccccatctctactaaaaatgcaaaacttagccgggcgcggtggcacgtgcctgtaatcccagctactcgggaggctgagggaggagaatcgcttgaacctgggaggtggagg[138 bp omitted]gtggaagccacagaatttttttggcccctctagccacgggtgtcctgcgtaccccaaaggcagagcagagcctgcttctcagctagagcctgaagggcagctgccgttcatcaaaacagctcctgtgcaattctgtgcctgtcgctggctcaggggcgcgggaggagggatgggctgcagcgagcgggtgtggtcaggcccaggctggtgcgtggtcactgggagctcgggcagcatggctgtcactgtagccacaccctgggtccctctgagtgggtttgcattgtccagctccgcgtgagagttgtcaagttcatgcgtgcctggtcaggggcgcagggtggccagatgaccagtgtctcctgcccgcagggcctcttggtggaaggagatggagaataactgccaagaggggtagaaaccaagcctggaggccggatggctgtaacccagcactgtgggaggctgaggtgggaggatcggtggaggccaggagttcaagaccagcaagggcaacatggcaagaccccatctctacaaaaactagaaaaaatttgccagatgtggtggctatgtctgtagtcccagctactcgggaggctgaggcgggaggattgcttgagcccaggagtttgagcctacagtgagccatgattacaccactgcactccagcctgggcaacagagcaagaccatgtctcaaaaaaaccccaaaaaaccaagcccagggaagcacagggcagtgcagtgcgccgggaggcttcccataggaactgctgtttgcgcagagccttgtccattgtgggaactgtcacagatgactgtgagcttgagagcagaggaagtagcgagaggaacttgggggtgtggcctgggagatctgagaggggatggggtcagggtgaagcccacctggcatgctggaggcagctgggcacccaggctctggggtgtctctggaggtgttacccgaaccagtgtgatcatggggacatgaggcagcaggcagccccgtcctcgaggagctcagagtctagttggcaagtctagaagccattcctgtcaccagggagggccacctcacagttgcccaactattggcgtcagtgtgctggccaggttctgaattttctaggacagcctcccttagaaatgatcctgccattttaaaaaatatatatttttatggagctatcattcacatactatgaaattcatcttcttaaagtatacaattcaggctgggcacagcggctcatgcctgcaatcctagcactttgggaggctgaggtgggcagatcacttgaggtcaggagtttgagaccagcctgggcaaaatggtgaaaccccatctctactaacaatacaaaagaattagccaggcatagtggtgcacgcctgtagtcccagctacttgggaggctggggcatgagaatcgcttgaacccaggaggcggaggctgcagtgagctgagatcatgccactgcactccagcctgggtgacagagcaagaccttttctcaaaaaaaaaaagatacaatttagtggtttttagtacattgacacagttgtgcaaccgtcaccactatcaaatgttagaacctttctattattacacaaaggcactctgcctccaccagtggtcactatccatcccctcccccatctgctggtacccacacatctctttcctgtctctggattggcctgtcctgaacatttcatagagatggagtcacacactgtgtggcctgttgtgtctggcttctctcagtgggcgtgatattctcaaggtgtatccacgcatggcatgtgtcagagccttgtcccttttctttcttttttttttttttttttttgagatggagtcttactctgccacccaggctggagtgcagtggcatgatctcagctcacctcaacctccgcctcctgggttcaagtgattctcctgcctcagcctcctgagtagctgggattacaggcacctgccaccacacccggctaatttttgtatttttagtagagatggggtttcaccatgttacatggccaggctggtctcgaactcctggcctcaagtcatctgcctgcctcggcctcccaaagtgctgggatgacaggcgtgagccaccgcgcccggcccactttgtctctttacctggctgcatcctattcccctgtgcggggggtgtcctgttttgttttccattcatctcagtgggcatttaagttgttctcattttttcagccccatcctctccccagtctgtggcagagctcagggattcctgtgctgcaccatgcagaatacaggccgagatggccccggggcagacacagcatagaaaccatttgtggggctggggtgggcggggtcagcttggcggatgctgggctgcggctaggctttgaggtgcagtggcccggcgggcctgcaggggtgcagaggtaccctgtgaggccacagggtctaggctccaggtcattagtggcgagtccgcgccacgggcctcttctctcagcctgagctggcgtgcctcagccagtggggccctggcagggacctctctgtgcagccacagggcccctgtgtctccgctccatggggcagcgtggccccagctgaccacagctctgacttgccctttgctgtgtcctgtaaggtcacccctggtgagcaggacccctgagtccaccacaccagggcccgacggctgtcctgtccccctcgtcctgtttttggtgtcaccccgctgtctggttagctgtgccggcctccctgaggggcttgtgagaagatgccagggcctttcttccccagagctgctcccgcgaatccagcctggggttggagagcacgctgctccctgggtcacttccctttcctggtccggggcctggtcccagccctgacagggttgtgagccttaggaggtggccatcaggttctaaatgtgcccctggggcccagcagcctccacctggacgtccccccaggaggttaaaggggtgagtgggagccccccccaccacgccgggccccttgggagtgcaggtgggttctccaggggagcaggtgacactgccaggcaccggcggtgctgtacagtcagcccagtgccaagccccacctcttcccacctgctctgcagtgctctccctgtggggacagtgatgtgcctggggactgtcacctgctctcccctgacagaggatgtgggttacctggggtgccccatcagtaccccaggggctgctgatgaacatgggaagaccccatggcagggggcggtcacgtaactaaacactaccaagtgtcatgtggtgaaggtggacccctgcctcacaccatggccagaagccaaccccacatgtagcagagatgagaacatgttactaaaacgattacaaaacctctagaagagccaggtgcagtggctcatgcctgtcatcccagcactttgggaggctgaggtgggcagatcacctgaggtcaggagtttgagaccagcctggccaacatggcaaaaccccgtctctactaaaaaatacacaaaattagcctggtgtgttggtgcaggcctgtaatcccagctacttggaggctgaggcaggagaatcgcttgaacctgggagatggaggctgcagtgagccaagattgcaccactgtactccagcctgggcagcacagtgagattctgtctccaaaaaaaaaaaaagccagacgcagtggcacatgcctgtaatcccagctactcaggaggctgaggtataagaatctcttgaacctgagaggcggaggttgcagtgagccaagatcgcaccactgcgctccagcctgggtgacaagagcaagactccgtctcaaaaaaaaaaaaaaaaaaagcctctagaagaaaacctggatgtatatgtaaaatgttgtatttcctttttttaaaaaaatttaaaattatttttatttctatgtttttaatggcttgtctgtataaccaaaagtgatgttctctctctctctctctctctttctctctttctttttttgtggcggagtctcactgtgtcaaccaggctggagtgcagtggcgagatctcggctcactgcaacctccacctcccgggttcaagcgattctcctgtctcagcctcctgagtagctgggactacaggcgcgtgccaccacacccagctaatttttgtatttttagtagagacagagtttcactgtgttggccaggctggtctcaaactcctgacctcgtgatctgcctgccttggcctctgaaaatgctgggatgacaggtgtgagtcactgcacctggcctaaaagtgatgtatgttttaaggcagcgctgtccagtgaggatgcagaacaagcccgtgtgtctgaattttctggtagctgagttaaaaggtgaagagaaatgggggaaattaattattacagtgtattgtattgaacccagtatacccccagttttatcatttcagcatgtaatcatcatcttcaaaactgttggtgagatgtttcacactgctttttcttttcttttttttttttttttgggtgctgtctttgacattcattgtgtatttcccctgagagctggccctacgtggttgatcatttggggagggccctggccccggatgcactgagcgtgatgccagcctggtgctatagatggggtcctggtgcttagtggaccagggcccacgctccttcctcccaccctcccaatcctgcccccgcctatcccaggcaggacttatggctctgatggtgtctggctggagagatgagacacacctgacattcaccagcaatggcaggacacgctgcgacaggtgcggctgaagaagagctaggctgtctggcggtggtcctggcctatcttcccagtgggctctcgcccacagtctctcgcctttgccagggagcactgaaccgtggactggtcctgggggccaaggggtcctggcggcccagcctgggcagcgcctctggcatcgcagctggtggggaggcgcagggctggtggggcttaggaggcgcttggcactgaggaggtgtttccgggaagagaatggcaggaagttggaatgcttctttggctgtaggaaagcccagaagagagacttgtggatcagcaccgcccaggaataacatcctatagccacaggcggcttcaaagggcttgagctatcagggcaggattgcgggaggattcgcagcagggaggatggacacccggagacctgctacccatgcacgtagcctgctgggctcagatccacctctcctgggtctgtgtctttatttccaaagtgggggtggctctgcaggtcccgcttcaaggctgggtgaggttaactgaattaccacgcgaaaagcccttggtgaagtagttctcaccccaggggcaattctgtctcttaagggacacctggccacagctggggacatttgtgatggtcaggatttaggagtgctcctggcgtggggtgggtggagggcaaggacactgctcagcaccctgcagtgccccgggcggcctcatcccagggaaggctccaggccagcatccaccgagcggaggctgaggccccaatccagagtggcgctggccaggttgggccccgggaggtcacaggaatgatttttctctgggcttgtttctgctcttgactgtgaatagaggtgctgcactagaagtttctaaaatctttttccattccaagacagcttagggtttatgctgctcttcgtgtttgtgctggaaaggaagttaaggagccgtggaagtgatcataaagcaacttgaaaataatagtttttgcggcctctttattataatggggcagccaggtgggttggccggggttttatgggccaggaagcaggcgtgggggtttctgggggaagctggacccgaggcagcgttgaccccaagaccaggactccgcgtctctcctgttccggcctgttccgtacgcctcgtcaggttttctgctccggtgaacttggagtgtgttggggactgacagatccagagaacatgcccctctgctgcatgatgccgctggggccctcgggagggcttggggtgtgtctgtgggtcttgcaaacactctcctcttggtgagaaggatctggttgcattttgtgcccttgggctgtcccctggctcggacagaggtgtccctgctgtaacccccacttcgcagggtaccagatgccactgcccaggagttactaatgtacctgggggtctggcacctgctccgtgaaacccgaggtctccctgtactaattaatttggcctttagccaaagggagggctgcagccttcgggatctgctgggtcacagtgggtgttaccctaacaagtttcctagagggatgttcattagaaaaataatttattttatggtataaaaattagcaatgacaggctgggcacggtggctcccgcctgtaatcctagcactttgggaggccaaggcgggcagatcaccttgaggtcaggagtttgagaccagcctggccaacatggtgaaaccccttctctactaaaaatccaaaaattagcccagcatggtggtgcacgcccgcagtcccagctactcgggaggctgaggcaggagaatctcttgagcctgtgaagtggaggttgcagtgagccgagatcgcgccattgcgctccagcctgggcaacagagcgagactccgtctcttaaaaaaaaaaatcagcaatgacagtgaagtggaaacaaaacaatacaagctgccgtcatctccagtgagcttccgaggtctctgctccatccatgtggatgtttgggaggggccctccgtgggctccaggcggctggtttagaggtggtagaatgttctagctctgtgaggctgggattcccaagtggagacctgtgatgctgctgggtgacaggcagaggatcctgctgtgcaggctggggctgccatgggaggcttggagcccgagggtggtgaggatggaattaagggatctggccccgcgtgctgtgccgggtgagaggcgggtgtgagcatggcaggaggctttgggggccgaatgtgcagtggaagcctggatggtgagcggatgagctggtgctggaacccagacccgccttcactgcccccagcgttgggccaggaccgctcatcctgtgggcggatggttttgctctgagcctcagcaccggttccaggagcgcagcctgggagcgcggattgggactgtctgtctctggccaaggctgtgtgtgtctcaggaagcctccccggcgcccagccctccacctctgtgtgttctgcaccggccgtctcccggtttttccctcgctgtctgggcctgaaacagcccagaagagaaatcggatctcttctcagcctgagcttctcttttagcctgagctgaaagagatcatcttgggaaggagctccccagcccggcttggattggtcccctctctggtgccccgggggagtagtgatggattcaggacttggtcctggtctgacctgccgtgggggctgtgatggggtcctgatgtgccccgtgtgccatggcgctcgccaagggccagcatgtctgcggcctcacaggggcttcacgagccacattcggggcagcgcttggtttggagtctagagccagagcctggcgtgggacccgagctcgtgaactctgtcagtgccactgacttggggcagtgtctccgtgtgcctccctgtggggcgatggcggagtaaacgggtgatggccactgagcgctggccgtggggactcttggtcctggctgccaagtagaagcttcaggggtgctcttcacagtcagctgactctgctgtccctgatagcagaagacagcgaaggcacctgccccctgccatggcaggtcggcgggcacagaggagggctcgggaggctgtgtcctccagcgtctccatgtttactgtgccaggccaggtgctgaggggccggcgaggaagacgtgaggactggagagagcctggattagggccctcgaggggcggcgctgctttagccgggggaacagggagggcctctcccagcaggtgacattcagtcagagacctctgagcgactcacacctgcccacctttgcaggatttgggacaagagtgctccaaagaagtgcaggcagcacgtgcggaggccccaaggcggaacgaggcgcagctcactgagctggcaggagcagagaggactgcaggggcacagaggccggagcagcagtgcctgctgcctagtcagccgtgagggcaaaggctggaggcactgctgtcagaggtttatgcctttttttatttttattttattttatttttttttttgtgagacggagtcttgctctgtcgcctaggctggagcgtagtggcacaatctctcggctcactgcaacctctgcctactgggttcaagcgattctcctgcctcagcctcctgagtagctgggatcacaggcgcccgccactacgcctggctaatttttatatttttagtagagatggggtttcgccatgttgcccagtctggtctcaaactcctgacctcaggtgatctgctctcctcggccttgtaagagttaaagaaagaggaaagaaacacaaaatgcagctggcagttaaaggcaagttttctttagttaaaacctgagaggcgctcttggccgattgcggtcaggagcgctttctcttatagactaagagtatatattggttttagggtgaaggggcttatcacaagcttggaacgtttctgtgtgtggagaagtttatggcagggctggaatctgtctgggaggaggggaggttatcttggggcagacatcttcccggccggaggggggttatctcggggctggcatgtctctggttggggaggagtttgcgatgtttctggctggagatgctatttgtggtttatggtcatgctgatcttagctgttaggctgataccctttggatttagcggtcttttattaaggtgaacttttagaatgaggggcttgtccgggatggcaatgcttctgctgtcaggcctcccaaagtgctgggatgatgggcgtgagccactgcgcccggccagtatatgtgttttaaagacctctctggtggctgtcaggagtgaaagcaggggacctgtcgggaaactccaggcgtcgcccaggtgattcatggcaatggctcaggagaagggggtctgggctggggctgcggcctggactgggggtggcttttggaggtagacaggataggcctggctggtgggttgaatgtggagtggggagatcactgctactcccagggtgcagcagctggtttcacgcccccagctcggccacttcctgcacagcgatgtggtcttgggcctgagaacgtgggaataacaaactcagtttctcccaggctgtcagagcagtcacagatcccttccagcacacgcgagcaaagcggtgcaggggcaggagctggggccctccgttcagttcactcctacctgggggctgcatcgggcaggacaggctgcgggctcctccccacgtacctaaccccacggcccatgccagtcacaagccccaggctgtgtcctgagcttctgctggacgcgctggaaaccagccttctcatgaacccttctttttttttcttttttgagacggagtcttgttgtgtttcccaggctggagtgcagtggtgcgatctaggctcactgcaagctccgcctcctgggttcacgccattctcctgcctc[187 bp omitted]aacccttctttgagcttaatttgctaatgcacctctcaaaactcaggggagctgttacttacgtttaccagcttattagaaaggattttacaaaggaggcagatgaagacatgtgtagggtgagggatgtgggaaggggcacagagggttccgtgctctccccgggctgtgacgtctccaggaacctccacgcattcatctgtggggaagcttccatcccagtcctccgggttttacctcagcttcctcgcagaggcttgggtgacctcactgcattggcctgggtgatcaagtcagccttcagccacatgcccctcccctcccgtccagcctgggtcttttcagtgagcagccctattccctcagctcccgaggggctgccaagcccttagtcacctcattagcacactggagaattccgaggatctgggggagtcgtaggccaggaaacaggacaaaatgtatttcacagtctcactgggccggtcccttgcctccgcttccttgtctgtgatgagaggacgggagggtggctgtctggacagtgctgaagtggtagaggtgagtcgctgccgtggagggcttggcagggtgctctgtgaagggccctgtggcctggggtggaagccgcttgcagagtgctggttctttgcctaaggatggtggggcaggggggccgtgttcacacgtgctgttggctgtgtctgccagtcttcctttcttttttctgtttctgtttctttttctttgtttttttttgtttgtttgtttgttttgagacagagtcttgctctgtcgcccaggctggagtgcagtggcacgatcttggctcactgtaacctccgtctcccaggttcaagcgattctcctgcctcagcctcccccagtagctgggattacaggcatgcaccaccacgcccagctaatttttttgtattattagtagagacagggttttaccatgttggccaggctagtcttgaactcctgacctcaggtgatccgcctgcctcagcctcccaaagtgctcggattacaggcatgagccaccatgcccagtcttcttcttcttcttcttcttttttttttgtgagatggagtttcactttgttgtccaggctggagtgcaagggcacgattttggctcactgcaacctctgccttctgggttcaagcgattctcctgcctcagcctcctaagtagctgtgattacaggcatgcgccactgtgcccggctaatttttgcatttttagtagagatagggtttcaccttgttcaccaggctggtcttgaactcctgacttcaggtgatccactcgcctcggcctctccgagtgctgggattataggcgtgagccacggtgtctgactcagtcttccttttcatgtcatcccttgttaatttcctttagaaacagtttgggccaggtgcagtgggtggcttatgcctgtcatccaagcgctttggggggctgaggtgggaggatcacttgaggccaggagttcaagaccaggctgggcaacataatgagacccagtctctacaaaaaaattaaaagcttagctgagcatggaggtggcacctgtaatcccagctacttgggaggctgaggcagaaggatcgcttgaacccaggaggttgaggctgcagtgagccacgattgcaccagtgtgctccagcctgggcaaaagagtgagaccctgtccccgccccacaaaaagagggtcagaaccttggtgttagagcagttcacttccacccaaaaacagggacttagaaagggagacacttgtgtggagcccgaggcagacatgccctgacttagcagtgcaggtttctgtactggaatgagggcctggggcaggtggcctctggcaggatgcatctgttacctgagtctgaaggcagcgtggcgaggagatgggagggctgtgcctgggatcctggggccgtggagagctcatctagaggtcatgagtattgggcaaagctcacatgccgtgttttaatactgtcattatggaagttggcctgggggtaatccagtgtctcttttagatctgtgttgtacaaacactgaactagttctggtcgcctctccggcctttgttttggggagaatattcgatgagatggcccgtaattctaacactgtgcattttgaaggatatttataaacccggatggataaggcccttcttagtgctattcttgtgttggttccctttattattttttttaaaaaactttattatgggccgggtatgatggctcacgcctataatcccagcactttgggagtctgaggtgggcggaccacctgagatcaggagttcgagaccagcctgaccaatatggtgaaacctcgtctttactaaaaatacaaaaattagctgggcgtgatggcgggcgcctgtagtcccagctactagggaggggacaggagaattgcttgaacccaggaggcggaggatgcagtgagctgagattgtgccgctgcactcctgcctgggcgacagagtgagactcggtctcaaaaaatagtaaagcaaaaaataaaaataaaaacactgttatggagaatttgactacacagaaaggtagacaacatggaataacgagccccccaggcccctcacccagccccaaaaccatcaacccatggcaaccccccctgccctacccccatctgtggtgaaatagccctcatattatttttgttaacttttaatttttaaagaattacagaggctgggtgtggtggctcacacctgtcatccaggcactttgggaggcagaggtgggaggatcacttgagtccagtagttcgagaccagcctgggcaacacagtgagaccctgtcgctacaaaagcaaaaataagaatgaattatagactgccaaggtgttgcaaaaataataaagagatttccctaggcttcaccctgctgtctccagtggtaacattttacataactttagtgtcccgttaaaactaggaaattgacacaggacactgtggcttcagaccttcctcaggcgtcctcagtgttagcactggctcattcttttggtagagtctttgcgacattctgttacctgcacagattccaggaaccaccattgcaatcaagatacagaactgttctgtcaacacaaaggaacgctctgcttctcccttctgtcacccccaggccctggcgacggctgaggatctctgcatctctgtaaccttgcccttttgagaatgttatgtagatggaatcacagcgtatttaacctcttgggattgggttttttcgcttgcaatctgtcgaagttgttgtgtgtatcagtagttactttcttttattactcagtagttctccatacgggtgttgttttctcattctgcttatttctgtgagacgggtggcagtggtaaggtcccatctttcattcccgattttagcaatttgagttctccagagatggaggacaagatccaaggttgccagggcctgggggcgacagagtggaagcagagtgagttcctttgtgttgacggaacagccctgtatctgattgcagtggcggttccaggaatctgtgcagataacaaaatgtcacgaagacatttaccttcgacagttttactggtcttttcaagggaccgacttttggtttcattggctgtctctattttgtttatttttgctcgttatctttgttacgtactgtgctccatctgccttagtttccgtgtgctcttctttttccagtgtcttaagggagatgcttaaattaatatttgagatcttcctctttttaaaaactgtataggcaattataaatttccctctaagtactgctttagctgcaacctgtactttttttttttccttgcgataggatcttgctctgttgcccagactggagtgcagtggtgcagtcacaaatcactgcagccttgacctcccgagctcaagcaatcctcccacctcagcccaccaagtagctgggaccagaggcatgtgctactatccctggctaatttaaaaaataattttgtggagaggaggtctcactatatttccccaggctggtctcgtactcctgggttcaagcattcctctcaccttggcctcccaaagtgctgggattacaggcatgagccactgtgtctggccatcctataagttttactttgttgtgagttcattttcattcacctcaaaatattttctaatattttcttcctgttcaaccctgtgattatttaggagtatgttggttaatttccatgtacttgtgaatccccaaattactttctgttgttgatttctaatttccattgtggttggagaacttactttggatgatctgaattcttttcaatttaatgaggcttgttttatggactaacatatggtttatcctggagaatgttccatatgtactgagaagagaatatgttctatagattcttttggcttatagtgctcaagtctctctctttgttgctcttctgctagttgtgttatcttttattgaaagtgagggtatgagccgggcatgggggctcatgcctgtaatctcagcactttgggaggccgaggtgagtggatcacctgaggtcagcagtttgagaccagcctggccaacaaggcaaaaccctgtctctactaaaaacacaaaaattagccgagtgtggtggcgcatgcctgtattccagctactcgggaggctgaggcaccagaatcgcttgaacccgggaggcagaggttgcagtgagctgagatcaccccactaccctccagcctgggcgacagagtgagactccatctcaagggaaaaaaaaaaaagaaagtgaaggtattgacatctccagctattgttgaattacttctccttttatttctgtcattttttgcttcatgtattttggggctctgttattagatgcatatatgtttataattgctgtatcttgctaatggattcacctttttatcattataaaatgtccctctttatctctagtaacttttttgtttgttttttttttgagatggagtcttgcacttttgcccagtctggagtgcagtgttgcgatcatggctcattgcagcctcagcctcctgggctcaagtaatcctcctgcctcagcatcctaagtagctgggactacaggtgtgtgttgccacgcctggctaatttttttgaattttaacagaggtgaggtcttactatgttgcccaggctggtgtcaaactcctgaactcaagtgatcctcccaccttggcctcctgaagtgcttggattacaggcatgagtcattataccacacctggcacatttttttttaagtctattttgtctgatgttagtgtagccactccagctttcttatggttcctgtttgcatgttacacgtttaatttttatattttcagcctgttttttttttttttttttttttgttattgttgttttgtcttttttgagacagggtttcgacctcccggcatgcaccaccatacctggctaatttttgtgttttttctgtagagacgggttttgccacattgcctaagctgatctcgaactcctgggctcaagcagtttgcctgcctaggcctcccgaagtgttgggattacaggtgtgagccactgtgcccagcctattttcagcctgttcgtatctttg[133 bp omitted]tctactaaaaatacacatgcgtggtggcgcatgcctgtagtcccagctactcaggaggctgaggcaggagaatcgcttgaacccgggaggtggagattgcagtgagccaagatcatgccattgcactccagcctgggcaacaagagtgaaactctgtctctcaaaaaaaaaaaaaaaaaaaaaaaaaagtgtcccctgaagacagtatatagtatagtatatagttggatcttgttttttaaatccagtctgacaatttctgtcttttgattggatgtttaatccattcatatttaatgccgttattgatatagttggatttgtacctgccatttccctttttgttttctattttgttcctttattccttctttgatgttttcttttgcattaagtgaatattttctagtgtaatattttaattcttttcatgattgttagcactatatttttggaagtattttcttagtagttgctgtcggtcttataggcatcttaacttctcagaatcgacttcagatccccaatatcatttgaagcaaggctgtgcttactccttttgaactgtgcttagcaatcaggatttcacttaatcagttcaatggcttgggttttcaaggatgctgatgtgtttgtttgcctgaatggtgcctcttcttttgctcattcctcctcacattcagtgaaatgaacacatcaaagccctcttaggacctgtgatcatcaaaaccatttggagaccccactgtctcgggagcagggcttgggaaggacaccagctcccctgtcatccctctccttgtgtttctggcttcttttcatctcccttgcaccactgaaactgatgagtttgtagccctgttcctgacacaagactccaaatctgtgtcagtgggtctcacccacttggaggcaggtcttttttttttgagatggattcttactctgggcaacagagcaagaatcctgggttcaagcgattctcctgcctcagcctcctgagtagctgggattacaggcacccgccaccacatccagctaatttttgtgtttttagtagagacggagtttctccatgttggccaggctggtctcgaactcctgacctcaaccgatctgcctaccttggcctcccaaagtgctaggattacaggcatgatcctctgtgcctggccgaggcttggcatttttaatttgaattggtagagagtgggtgccatcatcgttttgatgatcattcaaccccaggaatatgcatccctttcctgagaggcactctcatcctctacgcagagcagccagtgagctgctggagggaccttgggtcccagcacagtatcccaggctggctccctttaaatactcgttgtttttataaaagggatatgtaagtatggttggcgtgtgaactacaaatgtccctgcatcctgcgaccctgaaatggcctgtcttggtgttggcgctcctggtcgccgcggtgtcacgcgtagatctttgcttctcagtggctctgcagtcctttattttggtacagatatgtgtaatttacttacccattctcctactaatgagcacttacttttctctctctctttctttctttttagacagtgtctcgctctgtcgcccaggctggcctgcagtggtgtgatctcagctcaccgcagcctcctcctcccagttcaagtgattctcctgcctcagactcctgagtagctgggattacaggcatgtgccacgacgcctggctaatttttgtatttttggtagagatggggtttctccatgttggccaggctggtctcaaactcctgacctcaggtgatcagcctacctcagcctcccaaagcgttgggattataggcgtgagctactgcaccgaactacttttttctcttttaaacaatgctgctggccacatccttgctgccagcccttctaggtggggttgctcagagtgtgtgtgcctgttttatttttatgtttttgagagggggacctgctctgtcatccaggctggagtgcagtggcatgatcacagctccttgcagcctcagccccctgggctcaagcgatctcttgcctcagcctcccaagttgctggggccacatgtgtgcactaccacatctggctaatttttttttttttttagtagtgacgcggtctcgccatgttgtccaggctggagtttattttgaagcgtgttgctcagctgtcccctgaggtggtctgaatttgtgcccctgcacagtcattgtgggacagtcattgtgttggggacagctctggtctctgcccctccttataacctgtctcctcgtgctggttcttgtttgagttgccagttcatagcctttgcctgcttgttgatttggtatgttttttttcttgacttaaaaacaaaaaaacaaacccaaagcttctcaaattcggcactcttgctatcttgagctgggtccttctctggggtggggctgtcctgggccctgcagggtgctgagcagcagccctggcctccacccactgcatgccaggagcaccccctagtcgtgacaaccacagacagccccagacctcccagtgttccctgtgggcacagctgcatggttgggcagtgtgggtctgggtgagtgggttctttgcatccctggcctccaccccctccacgccagcaccaccctcagtcgtgacagccataaatgtccctagacatcggaaggcatcctctgggggcacgatcagccttggtggagaacccctgttttggaataaccctttctgtacccgggctattaccaccctattgtgttaccttttttctcagttcctcacttatctttagttttatttttggtgcgttgttacataggatgttttcaagttgcctgatgtgtccttccctttagggcttccgagtttgtgtcccacttagagaggtttcccccgccctaggagtccaggagcgtcggcccctggcttccactgtgtccttctgtggttcatgaggacctgccatctgggggcggcgaggtgggctgggctttgtgtttccaacatgtccaccccagccggctgggcctgcgtacccagtgggtggcgctcaggtctgcagctgcctccttggctccccggttgttagctgtgtgatctagggtaggccacttcctgcctgtgcctcagtttcctctcctgggaaatgggctggaatagctgtccctgcctcctccggttggtgggctggtcagccatgccaggcactcagagtcatccctgcctcctcgagttggtgggctggtcagccatgccaggcactcagagtcatgcctgcatgggggctccaggacctcgtcatcagcctcttcatccttactgtctggtctgttccaaaggccgcaggccccagaaagacggtgacactccaggaggttgctagacctggcgggccccagggccaggagtgaggggcggacgtgccactctgcactgctgtccctctccacccaggccttggggctcccagacaaccatgaaattacaaggcaggtttgtagatgcatagattatttagttaatgattatggttttaaatggttaattatggaacatcagatacctataaataagtgtgaaacatggactggtcctcttgtgtctgccaggggttgcctcctgactgggtgggagcctgcttgggggcccaagtctgctggcatccccgctctgtgtggctccatcccctcgcctgggggcagtggacggacaggtggcctttgcccgtagtgctccccagaccctgttgagtgcctggcaaagatgtaggtgggctgcacctccctttgtgtggaaggttccagaaggaagtgccaggtgaccaagcctgtgtctgtcctgggttttcttggctcttcacccaaacacttcccttttttgttgtttttgttttaataaaatttttttggacataatttcagactgaccccaaaattgcaagaataataggaagaattcccagacacctttcacccaggacccccatgtggcgacattccctgctttgcctttaatcctttcctctcattctctttccctgcacttcttcctaaactgtcagtgtgtggcagacatgacatccctttacctctccttcagtgtgtatttcccccagacaaggaatttttgtatcaagttatcaaaatcagaaattcacgctgataaaatcaaatctacagaccctattctgactttgcagtaatgtccttaagagtcagaagagaatccaggatcaacacagcactcagtcgtcttgcctgtcggttccttttaacctggggctgctcctgagtctgtctctgggttctctgactctgatgttttgggggcgtacaggccgtcattctgttaaatgtcccccaggtgggtttgtctgatggttcctcaggaccagattcaggccacacacttttggcaggaaagtcctggagccgacattgggtccttcttagtgcgccctatcaggaggcccatcatgctaatttgtcccatttctggtgatgttaaccttgatcctttggttaaggtgggcccgccaggtttccccaccctaacattactattgtaccatttgcatctcatggggaggccagtgtaaacacgccgttactcctcaaacgttcactgcttgtttcagcagacattgattcttgccgcatggtggttgtctagtcctgtcatttcttctgcgtttattagttgatgtctcctatacaggacagctgtcccttgttcctttcttatttctatcagggtgggcttgtggattcttactttgttcaatgggttataatccactgccatcacgattgatctggttgctcagatggctccacatttttccagaaagagcccggtcgagctggctcctgggccatttgacatgtccccaccctgctcggagcacttcccaactttttggcactgggatgctcccagctcatcctgtagtctccctcatggtcgatccctgggattgaccaatctccaaggagccctggttctgtttgtggagaatgccacttagaaaccgagatccaggtgctccgtgtgctcagtgctactggggtgtctttgcttctaggtcctctaatcagacagagctgggaagtagatgtgtgtacatcttacacacatgtacattgtgtgtgtatatatgaatagacatgtatacatacagacacctgacatttgtatccatctctgcatccatctatccacccacccatccacccatttactcacctatccatctatccacctgtccacccacccacccacctgtccatctatccatctatccatccatccatccacccacccacccatctacccatttactcacctatccatctatccacccgtccacccacccaccgacccacccacctatccatctatccatccatccatccacccacgcatccacccatttactcacctatccatctatccacctgtccacacaccgacccacccacccacctatccatccatccacccatttactcacctatccatctatccccctgtccacccacccacccaccaacctatccatctatccatccatccatccacccaccaatcccatttactcacctatccatctatccacctgtccacccacccacccacctaccaacctatccatctatccatccatccagccacccacctatccacccatttactcacctatccatctatccacctgtccacccacccacccacccacctatctaccatccatccacccacccacccatccacccacctatccatccacccacccatccatccacccattcacatatccgtccatccatctattcattcaccgatccatctgtccgtctgtccatccatccatccacccacccattcacctatccatccatccaaccgtccatctgttcattcacctatccatccatctgtctgtccatccatccatccatccgtacatccatttattcatccatccatccatccatccatccccattaatgcccatgagttcacactgaaacctctagttccagccccacacccagggtcccttaccatctttccccatcgttatttgtaactcccttggctgacagtgagaatccacccactgcctaccataaaagcatcctccagagtaggagccaatatttcttttttgtttgtctcaaagacatacagtcccaaactgtatttaaaagtttacatggattagttcttccatttttttcccccttctttactgtggttatattgtttgcttgaaataaggtttggtttacttgtttttgtttgtgttttggacaaggattttcctcctcaactcttgctgattttagttgcctgttgattgatttcttgattcaacatacgtgatgtagtgtatagaacattagcatggttccagagtcaggactgcacaaaaaggcatgggcggagaagtgtcatcaaccccctttctcctccccattcctgcccaccccctgcaggaaaggaatctcgttagtctctggctcagcctttcagggcagctcaaagaagcagatgtgtatttttttaatgtccccttcttttttttttttgagacagagtctttctctgttgcccaggctggagtgcagtggtgtaatcacagctcgttgcagccttcacctcctgggttcaagtgatcctgccacttcggcctcctgacttagctgagaccacaggtgtgtgccaccatgccaagctaatttttttatgtttttatagagaaatacagggtcttgctatgttgcccaggctggtctcaaactcccgggctcaagtgggctcccaaagtgctggaattacaggtgtgagccacggcgcctggccttataccttttctttcgcacgtgaaagtggcgctgtgctctgttcatttagctgtgtgtcctggaaaccacttcattggccagggagctcttcctggctcccctgcacagctgcgtagtgttccttgcagggatgcagcgaagtccacccagtgtctctcctgcatgtagatatttagtttgtttccaggctcttacggtggcgaactgtgctgccgtgagtaacctggtgtatatggattttcacattggtggaagggtatcttcatggtagattttcgtgagtgggattgctgggtcagaagtgcagacatattttgttagcttttatgctaaacacccatgtaagtcctgttccgccagctgtgtcgtctgggagggcctggttcccctgcctcgccagcagggtgtgctgtttcatgtctaaatacttgccaatcccagtgctgagaaatgggggctcagtggagttctaatgattgttcctgtagttatgagtggtgatgaacatcttgttgtgattaaagctgtttttgtatcttttctgtgagctgtatcttcatacttttcacttgcttttttctattggatatttgactctttcctcctaacttgaaactccaatatgtgaacctctgtggtatgtattgcaaatatttcctttgtgttttttttttctttttttttctttttgagactgaatcttgttctgttgcccaggctggagtgcagtggcacaatctcagctcattgcaacctccgcctcccaggttcaagcaattctcctgcctcagcctcctgagtagctgggattacaggcgtgtgccaccatgtccagctaatttttatatttttagtagagatagggtttcgccatgttggtcaggctggtctcaaaatcctgacctcaggtgattcaccggccttggcctcccaaaatgccgggattataggcttgagtcacctcacccagtgcaaatattttccctcggtctctggattgccttttggctttgttattggtgtttggttttcttttgccctgcagagtgtttttttttctttctcctttcctttcctttctctctcctttctctctcctttctctctactttctctcccctttctctctcctttcctttcctttcctttccttctttctttcctttcttctttctttcttttcactttctttttctttattctctttctttcaagacgaggtcttactatgttgcccacgctggtctcaaactcctgggctcaagcagtcttcctgccttggcctcccaagcagctgaaattacaggtgtgagcctgtaattagccacacctggctaattaaaaaaaatagttagctgggcacggtggcttacacctgtagtccccggactgtgggaggatcacttgagcccaggagtttgagaccagcctgggcaacatggtgagacccccatctctacaaaaaagaaaaaaaagttagccaggcatagtggtgtatgcctgtggtcccacctactcaggaggctgaggtgggaggattgcttgagcccaggagttcaaggctgccatgagctatgatcacaccactgtactccagcctgagtgacagagcgagaccctgtctcaacaaaagtcacatttctgagtctttactttctttgcctcttgattagagctgtggttgtaaagccctttccgtctctggggctggagaggagttcacctcgtttttttctggctctcgtatgattcctcctttacactcacgttccgattccaccgccgttcattctcgcagaggtgcgaggtggggacctcactttattgttttctgaatggctaccctgttgtcccagctccattgattaaaaaaatccctgcttgggccgggcatggtggctcacgcctgtgatcatagcactttgggcccaggcgggcggatcacctgaggtcaggagttcgagaccagcctgactaacatggagaaaccccatctctaataaaaattagctgggtgtggtggcgcatgcctgtaatcccagcttctcgggaggctgaggaaggaggattgcttgaacccaggaggcggaggttgtggtgagccaagatcgtgccattgcactccagcctgggcaacaagagcaagactctgtctcaaaataaacaaacaaacaaacaaacaaataaataaatccctgcttggccaggtgcagtggctcacacctgtaatcctagcactttgggagggtg[134 bp omitted]gagttaggagaatcgcttgaacccgggaggtggaggttgtagtgagctgagattgtgccactgccctccagcctgggtgacgagagtgagaccccgtctaaaaaaaaggtccctgcttaccccactgccttggggaaccccctctgtcccccacacagtctccgtatatgcctgagtctgtgtttggtcttcctcgtctctccacagcaggtctgccccgtgggttgttggccgcggtcggatgctcagccgcttgagaatgctgtctcctgcctgggtgcgtctggctcccctctgcgcgtcctgtttcgtgttattttttagagtttgtgcatttctctgtgtactttggtacacaaatgcttctttgaagttaatacgtggcagtaaagctggcactggggacggctagggcggtggatggcgtgtgtcctggagggcgggtgtgctggcagagacttaaggatgaggttaaggattctcctaagtccttttcttctgggggaaggagactcgtgggaacccctccagtgcaatggcctcgccatttccacacgccggcccctggcactttccaccattcgtgtgctcggctcccagctcttgccctgccacaggccctcgctccctcctcacccggcctggagtgcatggcccacagtgggcctgttctcaccgcgcatcccgccagctccttggcccttctcagcccttgctgccccccgggctcatacacctctacccacgatccagagacggatcgtcaggcccaccccagcccggcagcttcctagagcaatgccctcagccaggcatgttgtctggggacgctcggcagtgtctagacacagccagtccctgtgacccggtgtgcatgtgtgctgccgtgcacgtttcagctccccagtttcatgtagttgagaacgcttgactgtgagatgcaccacggctctgtgctccctgggagtccccgtacccccgtgcggtgagcgtgagaagtcacccacagaggggcaggaaggcggttatattttaatggtcacaggtgggcagtacccctgggtgttgggcagaggccacccctgctcccctccggaatacactccctactgtccaggcagccctcagattacagcccccagcctgaccccagagacatgcaaatatgggacagacgtaaggctttggtgccggaaccaggagcatcccgggcaaagtgagacgagctggtcaccccctgcacagtctcccacttccccaggcttcattctcccacccctggaagtggtaacccttctagaggtacctgtgtagcgtcttccttttctgcgcgctctgtgtgtgccggcctgtcctgcggccgtcacctggcagatagctgctgtcccagggatccagcacaaagcttggagatgcgtctgtgcagcccactctgtggctgtgtgtggagttgatggtggacttctgtcaccccatgacatctgaggctacaggagtggcctgtggagatgttggtggccaggtggcacaagtatggagaacacagatgcccggggcagctggcaagaaggggcaggtgcttttgaaagatgttaccaaaccgtccttcccagtggtgctgccaggccactggggcatagatcagtgtgggcacctgttcctccatggcctctgtgacctgtcgtgtcattggacttgctggtcagcctcctgagtgacaggatggtgacagctgccacttaggggacctcattgagcttcctgaagaccccacgatgagggtgttaacatggggagccccctttacagatgaggaaactgaggccccagaggtgggggcctcaccctcctccgggcctcatggtgggtggtgggggttcaccttcctttatttgcatgtggatatcaagcagttgtcccagcactgtttgttgaaacaccttttctttctgcattcagtggtcttgggaccaggccttgggggactgtgctctgtaccatgtcctcacccaggacgtccctctaagatcgctcttagaggctacagggccacgggggagaaggtccccaccattctccagcggctgcctcgccacacagctgggagggatgtggggtagagagccccctgcttggcactggccctgggggtctaagtgatatgaggggcaggggtcgcccctgcagtcaccgcgtcctcctctggcggaggtgagtggtgatgctgggtcacaagaggtggcttctcatcccagtggtctcgtgctgcacttcagggcctccatcacctgatctgggggctgtgggggtcctgggagagggctcatgggtaggggacagtttttgatgttctcttagtgaaggacagagaagaaggatggggggctggtggcggcggcagggagccaggatggtgctggtcccgcctcccttccttccatccctgctgcaggcctgccctcttcatgcctggctccccgcagcctctccctgtccccgtctgtcccgccactactggaaccccaccctgcctctgggtagtgtgcaccccatcctcagagcggaacccccatcccctgggcttgtgggggcttcacttcctgctgtttccccgcagcccacggccattctcctgctcctcccacccctcctcactgtccttcctggcactccaggcccctccgccgcatctttctgactcgtgttgccacatcatctgccctggctggggttttatctccctggcaactggaaatgtgttggttaagatatggtgagttaggccgggtgcagtggctcatggctgtaatcccagcactctgggaggccgaggcaggtggatcccctgaggtcaggagttcaagaccagcctggcaaacatggtgaaacaccatttctactaaaattacaaaaattagctgggcatggtggcgcatgcctgtcatcccagctactttggaggctgaggcgggagaattgcttgaacctgggaagcggaggctgcagtgacctgagatcatgccgttgcactccagcctgggcaacagagcgaaactccatctcaaaaaaaaaaaaaaagatatggtgagttaagagggtaaccagccctggagctgacagcctgggttagcacctctgggacttgggacggcctccatgttccgctctgtgaagtgggagtgacaacagtgcctttcccatggggctgctgggaagtgactcaacgaggagcaccagcaaggggacaccagagcgggccccagccacctcctggcagaagcatggggctcacgaggcggggcgggggtggtgaggaccaggcgcagacctgggcagggacctgggcggaacgggggaggcggaatcttctagaagggccttgggggagggccctgtccccaccatccctcgtgagcaccccctgccaacctccatctcccatttgagagttggggaacgtagcaaagttatctcaggactggaatatgaatggcagctcttggccaggctctgccatattggagaggtttctagaaggtcctggaagcccactggctcctctgtcattttcggcatggttttggcctctcctcttctcccttgcttcattgctgtgatgtcaagcatctcttcctgtgactgttgactctttttgtatcttctttggagaaatgtctgctccatcctttgcccgtgttttctgttaggttgtttgtcttttgttgagttgcaagagttgttgacatattctgcatacaagttccttatcagataatgttttgc[131 bp omitted]cagcctccaactcccaggctcaagcgatcctcccacctcagcctcccgagtagctgggactgcaggtgtgcaccacaatgcctggctaatttttttcttctttattttttgtggagatggcatcttgctgtgttgcctagtctggtcttgaactcctgtgttcaagtgatcctcccacctctgcctgccaaagtgctgggattatagacatgagctgccatgaccagccaagtcttttcactttcttgaggtctttgcaaacaacttttctttttccacatgcacttttggtgttttagccagaaatcttgcctgatccaaagccacgaaggtttaatcctatggttttcctaagagttgggtagttctgagctgggtatactagctcacatctatatgcccaatgctttggaagggtgggttgggaggatcgtttgaggccaggagtttgagaccagtgtgggcaacataggaagatactgttggtacaaaaagtttttaaaaagagttttgtagtttgggcacttacatttagatctatgacctatttggaattagtataaatatatggtgtgaggtaagggtccaccttcattttttgtgtgtgaatatccagctgtcccagcactatttgttgaaaaaactgttctttttgcattgagtggtcttggcactgttattgaaaatcacctgactttaagcgtgtgggtttatttctggactctcagctttctcccgtttatctaatgtctgtacttatgccagtaccatgctgtcttgattactgtaggttcataaccgtgaattattttttgtctagtcttgagtgtagatgttaaggaaaaataatatggttcttacattaacatatagagacccagattagctgatgagactacagccttcttagttgagatccagaaaaccctggctgttccctgcctccttgtttcttctttttctttttctttttttttttttttttgagacagagtcttactctgtcacccagactggagtgcagtgccacaatctcaattcacggtaacctctgccttctgggttcaagcgattctcctgcttcagtcccctgattagctgggactataggcatgtaccaccacacttggctaattttttttttttttttaatatttttagtagagacaggttttcaccatactggccaggctggtatcgaactcctgacctcgtgatctgcccgccttggcctcccaaagtgctaggattataggcatgagtgaccatgcctggcccctgccttttttttttttttttttttttttttaaagacagagtttcgctgtgttgcccaggctggagtgcagtggcatgatctcggctcaggcagcctctgcctcccaggttcaagtaattctcctgcctcagcttcctgagtagctgggactacaggtggatgccaccacgctcagctaatttttgtatttttagtagagatggggttttgccatgttggtgaggctggtctcaaactcctgacctcgaaagatctgctcaccttggcctcccaaagtgctgggattccaggtgtgagccaccgctcccggcctattccctgcttcctttattgagccatgccaccttcctcagttggattttggtatcaataaggatatgaaggttttggtgacatatttctaaataagaggctgtttccctaggatgcagaggttggtgacaaatgtcagcttttcagttctttcactcaagaaggatctgcaacttgaattcagcaggtttggtcttcagtggggcctggaagtggaagggatgtggtggtgtccacttggtttctgatcaccttggctctttcacggcctgactctcctcttccagtgaaaacctgctatgccttgagcttcagaggacagaggtccaggtggttgtttggtttggtctttttaactttttattttgaaataattttagactcactgaactgttgcaaagatagcacagagcgttcctgtgtacctttcactcagcccctaatgtgagcatcttatgtaaccacagaatgctcagaaattagccaattccatactaccatgcaatttactcaactatagattctttttttttttgagtcagagccttgctctgtctcccaggctggagtgcaggggcgccatcttggctcactgcagccactgcctcccaggttcaagcgattctcctgcctcagcctcctgagtagctgggattacaggtgccttccactacgcctggctaacttttgtatttttagtagacacagggtttcaccatgttggccaggctggtctcaagctcctgacctcaggtgctctgcctgccttggcctcccaaagtgctgggattacaggtgtgagccactgcacctggcctcaactatagattctattagaatatcactagttgtcccaccaatgtccctttcctggtctaggacctcgtccaggaccccactcaccatttagtctcataggctcctccaggtgtgccaaggcctccatcttgccttgactttcacgaccttggcacttccaaagagcaccaggcagatgttttgtagaaggaacttcccttggctttcagacgttttctcatggttagcctgggctctggactttttagaagcataccatagggctcatgctgctccttccctgtgcagtgtatcaggaggtgcgtgtggctgatgtggctgatgcggctcagcgtggtggtgttgaccgtggccgcctggctgaggcgtcggtcaagtttctccactgcaaagttactccttttccctttgggactttgagcctgtgaacatgtcctgttccttcaacttttgctcaccaatttttacatttccgcgtggctctttcctgcaggaaatattcccgtggtgttggactggtgattttatgttatgcttattcctttgacacttatgaaggagaattcttctgtggaggaaagctgtccctcttccccatttatcagttgcattttatttatttatatatttttgagacagagtctcactcttttgcccaggctggaatgcagtggcgcgatcttcgctcactgcaacctccgcctcccaggttcaagcaattctcctgcctcagcctcccgagtagctgggattacaggtgcccaccatcacacctggctaatttttgtatttttagtagagatggggtttc[142 bp omitted]gtgtgtttgttttatcctgtgggttgtaacatgatgctgtcattcatcctggtgctgaggtaggtggtcctcgttttggccatcaggagcccctcgcatgtcctttctgcccgctcccatcctgtcaagccttcccttcctctcaggtcctgcagggcgatctgggctcagcttgtatattctgccccagccctggaattgaccacgtgtcctgcagggctccctggttcctcacagtggagaatgatgtttacaaactgtggcctgggtgctggccgtgctcgatgctgttggggcatcattgcttctaggttttctctgctgacagggcttggaagtaggaacgctaacccatgtgtatatgcacacctgtatccatctcactgtctcttttccagagctcctgagttcatactcatagggtgccagagcgttcatgtcgtgggcccatctgaggctttgggtgtccacccccaacctgtaaggggtacgcagagcccctggaaaaaggaggaccttcctgtggggctgaagacttgggtgggaggcaggagatggcatgtcccttttgaaggccacctggggcttgtggccgtgggagaggcaggcagggctgggccctgggccatcccggctcaggcaacctcgccaggcgtgcaggtgagaggatcccttctttctggttcagagactcctgtttttggacccgtgctcagacccgggaaagaggtgggcagtgtggtctggtgcaggcccaactttcggaacccacccgagggtcagccctgggggctccggtgactggcagccccatggccaagagtacctccttttggggggttcttgggggccaagttctgtggtcctcaggcctctgtgctgtggtgccactgtctcctccctgattcccgccagtggtctcttcttccgccccacccgcgggtcttggcggaggggctcacagagccagcactgtatctgaggctgccctcagggtcagcacgtgcggggcagtggctgttacgtaatcggtagctcgtgctgtttgggggcgttgtcgtccgatgccttgggctgtcactgcaggcttctgtcatgctgcggtgggctccccttgccagttctattcctagtgcccagatctgcctagaagccgcagcagggttgacaggctgggcccgtggcagggtgcagtcaaacctaagccacctgggtcttcccctcctggcagttaatagaacttagcttttggagcagttttagatttacagagaatttgggcaagtggtagtgagagttcccgtctctgcctgccaccccccacccgttttccttgtgggaacatcctgcctgttgtggcgcatttgtctcttgattaacacgttgttaatgacacttcccgcttcattcggattgcctctgctttcccctaatggactgttttctgtcccagggccccccacaccgggattcctcgtggcccgtagccgtcccaggatccttcgtggcccgtggcagtcctgggatccctcgtggcccatggccctctcctcaggctcctctgggctgggaccactcccgacacgttccctgtgttttgtgcctggacagtgttgagggggctggccaggcagatggtagggcgcccctcgattggggtgtgtctggcattttgctcaggctggcacgcggtggaggctgttgggaggacttcagaggtaagggctcttctcatcacatcccggtgagcgtcaggacgtgggccatcagcaggatggggttggagccgtgtggctgttgctgctgccctgacggcgtagctgcaggggttcatcatcctctccccgggatgctgcccccgactttccatttgtgcactgatggaaggaagtcaccgcatagcccatgcgtaaggaatagggagctgcctgggccccaacccctcgtcttccctcctggaggggcagtggaggcaggctagcccggcctctcatctattgcggatggggaccagggtggacagaggcctaggctcgggctgtgccttgagaactggggcccggcctcagccccagagcctccagcctcccagcttggagtgggcgcttttggggccccagagagggagggcagaaggacccgtggtcttggtagcaccgggctgaggtctgtccagctgagagcctcagggtctggtggcttccatgccttcttgaccaagtgctgagagtgggggtggcccgtcgtgcagcgggggagagagctgtacaaagagacagttacttgtggcaggggagacccaggatcccgtggggacctggtggcagccaggagcagcaggtcacaggggagaggcctgggtggcccctgggagtggacaggcccttgtctccgctgaagtcagggaggtaccctttgctgctatgacaaatggccgcagacacagtggctgaaaacagcacccgttcattctctcccatgcctggaggagagaagtctgacatgggcctccctgggctaaaatcatgatgtgggcagggctgttccttctggaggctcccggagacagtccattcctttcctctcccagcgtctagaggtgtccgcatccctcggcttggggcccttcctcccccttcacagccacagcgcagcgttttccaggccttgactctcaccctctggcctcctcccatgaggaggctgtgaggacattccgcctcccggatcatcccctatctcaagatgcctaactcagtcccatccgcaaagcccctgttgccatggaaggtgaaatagtcccagggtctgggggttaggatggggacatctttgggaaccattgttctgctgcccacagctgcgtggagggattccggtcctcgggttcagttggtgacagtgtcgggtaggcctgggcaggtgggagaggtcgtgaagccctttgcagggcacttggccgctcatctggcacaggggaagaggcgcagcccgtggcccggcagtccaggacctgctgttcccttcctacccggggcggggcctgtgggaagatatggaagtcgggtgaatgagccgtgcccagtgattttaaaaagcagattaaaataacatagaaaatgtcagagctcattgcgtgctctagggcatttgtgaaacttgcattatttatttttttgagacagggtctcgctctgtcgcccaggctgcagccttgaactcctgggctcatgcgatcctcctgaggagctgggaccacaggcacatgctaccacacccggctaagtgttttgttttgttttgtttttgagacggagtctggctctgttgcccaggctggggtgcagtggcacgatctcggctcgctgcaagctccacctcctgggttcacgccattctcctgcctc[223 bp omitted]gccaggctgttgagactcctggcctcaagtgatcctccctcatcatcctcccaaagtgctggcattacaggtgtgagccactgtactacttggtgttatttaaaagtcctggtgaattgtaaaaagtgtacaacttcgggaggc[135 bp omitted]gaggcaggagaattgcttgaacccggcaggcggaggttgcagtgagccgagatcgtgccactgcactccagcctgggtgacagagcgagagtccgtctcaaaaaaaaaaaaaaaagtacaacaaaaccagggccccagggggcgagctcctctgccctggaggttgggcctgccgaggggaccttagagtgcttctgaagtgagagttggcattagctgagcagaaggaagcagagggcagcctgagctgagagccagcaccggtggagctctgagacgagggctcgcaggcctgggcacccaccgagccccaggtgtgccaagtccagtgggagctgcaggtcaggttgtgaaagtccttttttttccctagacgtagtcttgctctgtcacccaggttggagtgcgtgcaatggcatgatctcggctcactgtaacctctacctcccaggttcaagtgattctcaagcctcagcctcctgagtagctgggattacaggtgcacatcaccacgcccggctaatttttgtgtttgtagtagagacggggtttcaccatgttgaccaggctggtcttgaacccctgacctcagctgatctgcctgcctcggcctcccaaagtgctgggattccagatgtcagccacctcgccccgccatgaaagtcttgatattggccggcgtggtggcttatgcctgtaatcccagtactttgggaacccaaggcaggaggatcacttgaggccaggagctcgagaccagcctggacgctatagtgagaccctgtctcttaaaaaaaataaaaataaaaaagtcttggtgtcacatccaaagtttggagttctgttccgcatccatcctacaagtatctgagcgtctttgtgtccaggactaagttcaacgcctgggctgtgccttggcccctgtgcggtcgcagcccctgcccccctctctccccgtgctctgcctcttggtgttgggaggtgggggaaaaactgggtgcattttctgcacttttccccttggaggaagcaaaacttcttgaaaatctctcagtaggtgtctgcgtcttaaggcctccagaagcttctttggtttcatttgactgttcacggatactcccgctgccttggcccgtagattttaggagctaagcttaaaatgggccctcattggaaaacttgactgggtaaagtgcttatagttacggatttttgtcttgttaaaaattgacaagaatgtggaaaatctgaataaaggcaagcgtcctcgggctgcgtacagctggtgggagtcgaatttagaattaaaacttgagcgtgccatcagtttagttaatcatgcttttatttgcatgttttaggaaccatcactgttgctggaggcacctgacaaatcctagcgaatttttggagcatctccacccaggaacctcgccatccagaagtaagtaacacgggcctggcccccaggtggccccacaggaccagggaccggaaggctgtggcctcttccctgggtggcccgccagggagaaggtggtggcctgaccggctctgaattcccgggacgtccaggcgcaagctgtgcttagacgggagcctgcgggccatggtagggaggttcttctgcaagtttcttcatgaagcctgtctgctttgggcttgcatctcgcccttcggcatcgaaccacccgactctcacttctagaaactggaaaagctgtggctcctcctgcatttcgggtgacactggggtttcccaggacccactaccctgtctgcatcggccctggggacacctgagctcaaggggcgttcccccacacactgtcagaagtggggagcagttagagcagggctctctaaaaatgggagactcatttttaaatgcctttgaggtagttccatggcccagccgccccgggtttagttccttttcttgtgcctttcttataagccggtggcacaaagaggtgcctctggtggcagcccagggggaccactcaggagaagagagagaatgacctcatcccttctggccacacccacagggcccgggtgacccagtggagggtgtcaagtgtgggatgagcagtgcagtgtcctcccgtcaaggcagaggtggcagtggcagcggcggccggcagagcaccggggaaaggctgccttgtgcggcgtcgcccttggattgtgtgccgcttccctgtgcagagggaggaaggggcccatccagggccccctgtagctaatgagggcgagtgtggacttgagctggggcccttgagtcatttgtgggtgccttttctgttctactacgattaggaccttgaggagggtggtggagcccagcctcttttgggaagtcataaagtgtaagggaagaggctctggtcacgtggttggcaaactatggcccctggacccaatctgaccccctgtttttataaataaagttttattggcacatggctgtgtccatttgcctgagcattgtccctggttgccttctcctcacagtgggagaagtgactagctggaacagagggcgtggcctgcgcatctggagatatttcctgtttgggcctgtgcagaaaaccatgcgcctcctcttgtccaggttaacttactgctggctggagcaggatggacgagtctcttggtgacttggtttggaaattggcaggtctgtctgtgcctcctgaaatcttgcttttacccttcaagtttgtgcttccttacaagatggtcaattttctaaaactcagctgttttctttgtacccaaattaacacagcatgaaccaagtaagcaacttgctctgtcagttagctttattatttatttatttatttttattttttttgagacagagtctccctctgtcacccaggctggagtgcagtggcgtgatctcagctcactgcaagctccgcctcccgggttcacgccattctcctgcctcagcctccctagtagctgggactacacgagcctgccaccacgcccggctaattttttgtattttcagtagagatggggtttcac[137 bp omitted]acccaggctggagtgcagtggtgtgatcatagctcactgcagcctccacctcctgggctcaagggatcctcccgcctcagcctcctgagtagccgggactacaggcatgcacaccacacctggctaatttttttattttttgtagaggctatgttgcccaggctggtctcaaattcctggcctcaaatgatcctcccacctcaacctcccaatgtgctggggtcacaggcgtgagtcacctcatcctgccgaagttcaccacatagcccttgataaacccactttatatctgaaggtgctgagtgcagcaaccaggaggtgctagaaagtcctcggggagagcacaggagacaggagtaagggagcagggctcctgcttccgaaggcctggagctgaaggagaggaggagctcagggcaaaccatgtgggcttgctgtggtttggcaggtccccagataggctgccttcactttgtaaaagttaacttttactgagaggaaattcacatacatcatattcactctttaaaggatacagtttggaggtcgttggtgcactcacagggctgggcagcatcaccactcattccggagcatctcattgtcccagaggaagctctgtccccctcagcagttgctcttcatcctgtcccccacaccccaaaaccaggcatctccttcctgcctctgtggactggcctgtcctggacatctcatagaaatgggatcgcgcactgtgtggccttttgtgcctggagtctctcactgagtggcccatcctcagagttcatccactccgtggcctgcgtcagagccttgctccatttcatggctgagtcgcgttctgctgtgtgtggtgccgggcgacctgctcccctgctgatgggcgctcatgtggcctcctctctggctattgggagtcgtgctgctgtggacattggtgtgcaggtgttggtgtggacgttggtgtgcaggtgttggtgtggacgttggtgtgcaggtgctggtgtggacgttggtgtgcaggtgttggtgtgggtgttggtgtggatgttggtgtgcaggtgttggtgtgggtgttggtgtgcaggtgctggtgtgggtgttggtgtgggtgttggtgtgcaggtgctggtgtggatgttggtgtgggtgttggtgtgcacgtattggtgtgcaggtgttggtgtggatgttggtgtggacattggtgtgcaggtgttggtgtgggtgttggtgtggacgttggcgtgcaggtgttggtgtgggtgttggtgtgcaggtgttggtgtggacattggtgtgcaggtgctggtgtggatgttggtgtgcaggtgctggtgtggacgttggtgtgcgggtgttggtgtgcgtgttggtgtgcaggtgtgggtgttggtgttggtgtgcaggtgttggtgtggatgttggtgtgggtgttggtgtgcacgtattggtgtgcaggtgttggtgtgcaggtattggtgtggatgttggtgtgcaggtgttggtgtgcgggtgttggtgtgggtgttcgtgtgggggtgttggtgtacaggtgtttgtgtggacgttggtgtgcaggtgttggcgtggatgttggtgtgcaggtgttggtgtgggtgttggtgtgcaggtggtgtgcaggtgtgggtgttggtgtgggtgttggtgtgcaggtattggtgtggacagtggtgtgcaggtgctggtgtggacgttggtgtgcaggtgctgctgtggacggtgtgcagatgttggtgtggacgttggtgtgcaggtgtcggtgtgggtgtgcaggtgttggtgtgcaggtgttagtgtgcaggtgttggtgtggatgttggtgtgggtgttggtgtgcaggtgttagtgtgcaggtgttagtgtgcaggtgttggtgtggatgttggtgtgcaggtgctgctgtggacggtgtgcaggtgttggtgtggacgttggtgtgcaggtgtcggtgtgggtgttggtgtgcaggtgttggtgtggatgttggtgtgcaggtgttagtgtgcaggtgttagtgtgcaggtgttggtgtggatgttggtgtgcaggtgttggtgtggatgttggtgtgggtgttggtgtgcaggtgttggtgtggatattggtgtgcaggtgttagtgtgcaggtgttgttgatgttggtgtgggtgttggtgtacaggtgttggtatgcagatggtgtagatgttggtgtgcaggtgttggtgtgggtgttggtgtgcaggtgttggtgtgtaggtgttggtgtgcaggtgctgctgtggacatgcgtttttgtttcccttgggccgacacatgggtgtggaatcgcgggtccaagggtacattctgtttagccttctcaggaatcgcctgcccgtctccacggcggctgcacccttcaacattcccaccagccgtgcatgagggctgcctctggtcttggaaaagactctcggaatagttgctcactttctccatttcgaccctggagccgtcgcttggtgcccagaggaagccaggccgcgggcgctgggggaagggggtcccactgcagctgcaagtcggcctctcctcctgcctgcttcccgtgcctcggctgttggcttatttgagtattgaatcgtaatggtttcttcctcctaaatagaatgctaggtttccttgttcaggcctcgtaacttttcctgacctgtaaaaaagcacaccttgaacacttcgctttctgtctgtgcacacggataggtgtcagctgggggctgatagaaaacatccctgactggccgggtgtggtggctcacgcctgtcataccagcactttgggaggctgaggcaggcggatcacctgaggtcaggagttcaagaccagcctggttaacatggtgaaactccgtctcaactaaaaatacaaaaattagccggacgtggtggcgtgtgcctacaatcccagctactcgggggctgaggcaggagaattgcttgaacctgggggcagaggttgcagtgagctgagatcgcaccactgcactccacctgggcgacagagtgaaactgtctcaaaaaaaaaaaaaaaagaaagaaaacacccctggctgcaggcttcgggcggccctgtgtcctccagctcttggggtggggccactctgacatcatgtgctgttttggggagtgtcatgaccaggagggcatcttttgttttttcttttaattaaaacaaatactaggctgggcatggcagctcatgcctgtaaccccagcactttgggaggccaaggcgggtggccttgattgcttgaggccagaagttcaagaccagcctgggcagcatggtgagacctggtctctacaaaacaaatacagaaagtactgggtgtggtggcatgtacctgtggggcgggaggatggcttgagcccgggagttccaggctgcagtgagctgtgattgtgccaccgcactccagcctgggcgatacagcaagaccctgtttcaaaaaataaaataaaaaacaaacactgaaggaaaagagtagatagagtgcaggcctggcacaggttttttttttttttttttttgagacagtctcgctctgttgccagactggagtgcagtggcgtgatcttggctcactggaacctctgccccaggttcaagcaattttcctgcctcagcctcccgagtagctgggattacaggagcgtgccaccatgcccggctaatttttgtatttttttagtagagacagggtttcacggtgttggccaggatggtcttgatctgttgacctcgtgatctgcctgcctcgtcctcccaaagtgttgggattacaggcgtgagccaccatatccagccagatttttaatttaagagacttggcacgcattttttgtttgcctctgtctgctttccgtaggcccccaagcaggggcaatgtgtgatcgtccgtttgttttctcctctgcagtttgggggtccttgggtagaaggactgagcattgagcttggatcaaactgttggttttatggacagagtcaagtggcccggaggtggtgacttgggccatgttccttgtgagggttttgtctgtggctcattcattcagcacaggcgggccctgtggccaggtgctgatagtcctatgttccctctgagagtgtggccctggtccctcatctcctggggatcagtggtagggccaggcctggccccaggtgctctgggtcttgtgcctgtccttcctcacaccacctctcttgggtacgtagggcacagggcacaggacctccgcccgagggccaccgtgctgaggtgtggctcacatctcgtggcttcatcttgaggctggtccgtctgcttgtctcaccacacttaggcctgagtgtctgaagaagtaatgagctgcaaacctcatgacctggaaatcccacctgtcagagcccaggcctcaggaggaggcaactgaggacattgggagtgccagcaactggagcccacttccacctgcctcacttaggccactggccacccccacggatggtcccgggagttagctctgtgaccatgcgcggctgttcctgctccacctcttggagtgccgcctctgtctgttggtgttgcaggggagctgggttgggagagctcactcccttgtctgattttctggaaactgtgctcctgtctgagtgagcgcaggcagaggtgctcagtttacccgaggtgtgccgggcaggagtgctctccaggtgggggggcttggagggatgtgggggttggtactttttttttttgaagttttaatttgtagtttttatgggtacaaggtatgcttatttctttgcatggtacatttcccacatggcagtcgtggtggactgaatgatggtccccatggatgtccacatcttaatccctggaacccatgaatatattaccttaaatgacaaaagggacttttcgcgggtgggactgagtgaaggaccctgagctgggagatgaccctggatgatctggggagcccgatgtcctcaccgggtcctcatgagaggaggcaggagggtgagagtcagagagaggctggaagaggctgtgctgtggctgcggaggtggaggaagggccttgagctgagggaacctggcacgcgctggtgctctctggagtaggacgaagcagagaacgttctcgtgccaaggttttctctttcctgcctgagggccctttatgtagatcagaccagagacaagtgaatcccggtcttgccaggggaggcatttggagctgctcgtgggacgtggtgatgcggtgccaggccacatgcccggggctggggccgagtggcgttctcgtgctgcctctgtggccaggtttcacttgggaacctggctgcatcgcgggttcctcctgggccttctggtggcttggggctcctctgtcctcggtccctgctgggaaccgtgctttggcagcaggaaccagcgagatggcagcacaggggctggaggccggctgggactcactggggccgcatggggcttcacctgatgcccagccctcctgggacagggaccagtgggagcaggaggtgggacaagaggacgagggctcgagggagcccccacacttcctacc[132 bp omitted]gcagcctcgatctcctgtgctcaaggaatcctcctgcctcagcctctaagtagctgggtgtgcaccaccacgcctggctgatttttaaattttttgtagagatggggtctcgctatgttcaggctcatcctgaacatctagccccaagtgatcacccaccttggcctcccacagtgctggggtcacaggcgtgagcccctgcccctggccttcttatttttaaaccgattctttgtcatcagtttctgcgtgtggccgctgagagccatcacctggctgtttcttgggtgtcccttgcgcccacacccctgcatcctgccccaccttcaagttcttccatcccagagtggactctggggtcaaggagagtcctcagatcttggggacatgggcagttgtggggcctggggtcatgtggacaggatgccggcccagccccagcagtgccagtgcaggtggggtgaaggcctgatggggtcagccagactgtccccacctgaagccccctgccaagcccctgcatctgaagactgaagagtgagggtggcagcccgggagggtatccttgggcccagtgtgtcagcgatcaggagagcagcccaggctggagcgtgcggccctgctcagccgggccggaagcgtccctcacttgttcctcccccaggttgcagaggagctgtccaggacagccggggtggggccgcccataagatgcagctgctggtcccatgtcatggtcacagcaggagggctgaggagccaggcctggcccgtggtgtgcagggtccctggaacaaacagctgccctaaaaaaaaaaaaggctttaaggccaggtgcagtggctcatgcctgtaattccagcactttgggaggccgaggtgggtggatcatgaggtcaggagttggagaccagcctgaccaacatggtgaaacctcgtcctactaaaaatacaaaaattagctggacatggtggggagtgcctgtaatcccagctactcagaaggctcaagcaggagaattgcttgaacccgggaaacggaggtttcagtgagctgagatcgcgccactgcacttcagcctgactgacaagagcgagactccgtctcaaaaaacaaaaacaaaaaggctttattgagatacaatttgcgaaccatacaagtcacccatttgaagcatgtcattcagtggtgtgtagtttactcagaaggctgctcttgggcctcaaaatgagtagaggggagaaagggaccctttttttgttgttagagattttgagagctgggttgggttaagcggctttcatggtaagctggaggcccaagcctgtcttgagccccgaataaagaagaaacctaggggtggggcgtggtggctcacgcctataatcccagcactttgggaggccgagatgaggggatcgctaagcccaggagtttgccctggtctcccagcttcctctgcggtgccccagccaggagcagctgtagactctgtggaccgtatgtgaaatgaacccacagggttcccgtgctaaaaccatggagagtcttcaggtggggccagccgggccttaaactgtgtatctaactgagtggggcctggggtacccatgggggttgcatgccctggaagccagccctgcctgccatccacttcccacagccagagagagctttctagaaatttcggttggatcgtgtctccttgctctgaaccacctgtcggcttcccgtccaaccccacaggagggcaggctccttccagcccagcccccagggcccaccctggtctagcctcgatcctgccgcctcctctgcgctccctgccatccggcctctggggccttagctcttccctggcttcgctgggtccttccctttgcctagactttcctcctgccctggaccgcccagaacttgcacccctgcgtgtttgacaatcacttccagacgcagccccgctgccacccagacctctctggtcccaaaccaacttcatttgtctttttccttttttttaaatttatttatttattttattttacttattaattttttttgagacagagtttcactcgttgcccaggctggagtgcaatggcactatctcggctcaatgcaacctctgcctcctgggttcaggcagttgtcctgcctcagtctcccaagtagctgggattacaggcgcatgccaccacacccagctaatgtttgtatttttagtagagatgggagtttcaccatgttggccatgtcttgagccccgaataaagaagaaacccagggacagggcgtggtggctcacacctataatcccagcactttgggaggccgaggtgaggatcgctaagcccaggagtttgccctggtctcccagcttcctc[139 bp omitted]tggagtgtagtgatgtgatcacagctcactgcggcctcaaactcctgagctcaatcgagtgtcccacttcagcctcccagagcactgggaccacaggtgtgtgctgcagtgtctggccttcatttgtcttcgaaactcttgctcgcccctctgtgacgttgttaattagtagtcttccagattgggccccgtctcgtcccagaaccgaaactctgcctggcacgtggtggggcctgcacatttgctcagcggaggaggattctggggccctgggttcccgaggctggcaagttggctcagagctgcccttgggatgggtcagggtggggtaggctgggggcagcacagagtgggcacaaggcagttttgtggttttgaaattgagtttgtatcaagagctttactgcttttgtaaaaacttactggcatggtaccaagagaaattcaaacaatagttggtaataaaatccctccctacccctgccctggtgtccccataggagctgactgccgccccctttctgcagcattagctattgtctagaatcttctacaaggatggggcagggcggtgggagcagggcccgagggtcccagttgttgggaactatgttggcctggctccagccagctcacaccacggggcagccgaggcctcctttggcccagctgaggccttcacggcaccccgaggcccagagtcccgtgagcgggagacagagaaaggggtctccaaggaagggtgggcctggcagcagcactatgagcagcggcaggtgcagggtgccaccaggcagaggccggcagaggcagaagccggtacggttgccctgcgtctgtttccacatctgtgtatttgtgccagggctgctaaacatgcacagcaggcactgtggcgcccaccccaaatcacaggaaggatgtgtctctctgtgaccgtgaagcccaccaccactccatagtgttggctcacacccggctgtttcccacgcctccccgcgtgtccccaagacaaaaggtctgggatgaagctgccgtttgcatggctggggatgtctccttgtcctctctcagctgagaagagtgccagtttcctctcttcttttgcgagttcaggagagcattattctttcttctttccatcattcttcctccctccctttcttctctctcttttcagtttttttttttttttttgagacggagtttctcgtcacccaggctggagtgcaatggcgcaatcttggctcactgcaacctctgcctcccgggttcaagcaattctcttgcctcagcctcctgagtagctggggttacaggcacccaccaccacacccggctaattttcatatttttgagtagagatggggttcatggtgctggcc[136 bp omitted]acactcatttgttcacccatttaaagtgtccagttccacagttttcagtatattcaaaaacttgtgcaactatcatcacaatttgatttttattcatttactttttagagacagggtcttgctctgttgcccagaggctggagtgcaggggtgcagtcatagctcactgcagcctcgaaatcctggcctcaagtgatactcctgcctcagctttttgagtagttggcaggcacgcaccaccatgcctggctaattttttattttaatttttagtagagatggggtctccctacgttgcctaggctggtctcgaactcctgggctagagcacccctcccgcctcagccccccagagttctgggattacaggtgcgagccactgcactggccacagtcagtggagaacattggcatcccctacagagaagccctgtagcctggggtgtaacacacggccttttgtgtctggcttctctcactgtgatgtcctcaaggttcctccatgtggcgcctgtgtcagagcctcgttgcttttcatggctgtgtcgtattccaccgcatggatgggccatgttgtgttgattcattcttctgttggtggacacctgggtcgtttccacctttggctgttgggaattgtgcttctgcagacgtggtgtacacgtttctgtgtggatggatgttttcatttctcttgggcagatacgcaggagtggaattgctgggtcaagtgtgatttatgtgtgacatttccaggagctgccaagctgtcttgcagagcagctgtcccacgtcaccgtcctgccagcctgtgttcgagggccccaatttctccacatccctgcccacagtgtcaccgtctgtcattctgattctgccatcctggtgggagtgaggtggtggctcattgtggttctgatttgcatttccctggtgctgagtgctgctgggcaccttttcacgtgcttgttggccatttgtctactttggagagctgtctgcccaagtccttggcctgttttttgctggttttttagacatggtttcgctcctgtagcccaggctggaaggctggagtgcagtggtgcaatcttggctcactgcaacctctgccttcccagctcaagcgattctcctgcctcaccctcccaagtagctgggagtacaggtgcagaccgccacacctggctaatttttgtattttttatagagacggagtctcactatgttgcttatgctgatgtcaaactcctggcctcaagtgatcttcctgccttggcctcccaaagtgctgggattacaggcatgagccaccgcgcccaccagccttggcccatttttactgggctgtttgtctttgcctctgagttgagagccccattccttggcgtggcgccgttgtgagcatgttgctgttgccgggcagctcctctggctcttccagggtgtctgatgcccccgagtcatcctgtgtcctctgtctgccacattcctggtgacctggaaggtcagtcacaggactgcatttcagtaaattccctcttccctgtttagctgtgttgcacgtgcgtcaaggttatggcgcgtggggattgtggaccattttagttttctctgtatgatttacttcctaagcatgtcatttccaaaggcacaaatggctgggcatgatggctcatccctgtaatgccaatactttgggaggccaaggcgggaggatcatttcaggccaggcgtttattagcagccagggcaacatggcaagaccccgtctctacaaaaagtacaaaaattagccaggtgtggtggcacacacctgtggtcccagctagttgggaggctgaggcgggaggatggcttgagcccaggaggttgaggctgcagtgaaccgtgaccgtgccactgcactccagcctgggcgacagagccagatgctgtctcaaaaaacaatagtttcttaaaaagtgcaccaagttgcccctagggggcggtggtgggtgaagtgcctgagtccctgtgctgagagtggctcccggtgtcacggctccaccttccagatggaagggctgtctgggtctccccagcgtgggttttgatgcgtaacctgccatgggcttttgtcacctgacactgcagggtgtgctgctggcagctgtggccacgtgctttccagacgagcccccgcaaccccacgaggtgtggggagcccccctttttattatttatttatttatctattttttgagacaggatcactgtcacccaggctggagtgcagtggcgcaatcacagctcactgaagcctcgacctcccaggctagagtgatcctcctgcctctacctcccatgtagctgggaccacaggtgtgtgccaccgtgcctagcgctttcctgtcgtacagagcacaagtttgaggcatcccttgggccgtccagccctgccccaggccctgtccttcctgggcccagctggtctgggggacatgagagtgtggcaggccccatactgcataggtcaccctgtggccagtcctgtggggcaggtgggctttgatgacctggaggtcagagcctgcagaggggggtgggccagcccctcacatgactcttacttgagggcttcctgggagctgatggcccttgcagtgggttacagggaggcaggaagaggccatgtgtgcaccggcctgcagagaggcagccagggacaggggctgctgggtgcacgagggtcccagcgcctccaccagctgccaaagcgcagggggagactcatgcggtcatggcagtgccctggcatagcatgcagcccagctgtgtgccgtgtggcctaggcccacaactgcccctcgtgggcctctgtgcctcctcaataagctcagtcgaccatgtcatcatctgtgatgcacagagcagggccagggacccgggaagtgctgatgtggggaccactgtggccaccaccgcatctgggcactgtttgtggcagatccagggatggcctcaggcctttggcccggcctctgagggctggggaccagtaggaggcctgaggtgaccgcgttctgccacccagtcctcccagagggctgccctgacaggtgccttggcagctcccatcgtggctactggcccagctcaggccggcactgagggtcccacagtggtccagctgcggcctctgctccctctgagccggtggctccctggggacagtgcgcaggccctgggtgaacactacatggccacatctgggtgagagcgggagggcaggtgcagcgttggggggatcctggggcctgtggggttggcggggtcgcaggtgaggattgggtactgggacctggctgtgggcgaggggcccgctgggacagtgtggtggcctgggaggccccgcgcagtcagaggctggtctctgggcacaggcagctctggtgactgtgacaggtgccttgccttgacacacactgtgaccgtctagtctacatttctaggctgcacgtggtcacgtgccgtgcacggtgcacttggggcctcctgtgcagacactggctttgcggctgccccatgggagaagctgcgaggactctgcacagagcaagggtggcgggcagggcctcagcccacgtgggcttggagctgtgcggttttgtcaaacccagtgggggtctctcagcagcagcccagcgcggggtgtgacgtcagggctggggctcagcgctgggtatcagccctgtgtgctgcaggcagggtatggggtggacccaaggcagtaggtggaggccagggggcgacctcggctttgcttttgtcaggatggagggttctggacaccagtgcaagcctagctggggcctccctgccgtcctgctcagattcctgggtgcatgctgccctctagtgcccgcagtggggagtgccttcaggagcgggtggctgcaccttggtggctgggaaccccactcccgggactgtctgggcggctccctgccttgtttccttcacactctagatcactttgggggtcacagcgtggggaggtggattttgttaagttttttctaagtttttgggtttgtgtggacttgggtccttgtttccgaatcctagagggattctgtcgtctttctgcctttggagattgaacctgccaaggaggacccttccccagagtctgtgatcaaagtcccttcctggtcggggtgggctaccagttcccaccctgcaacacctgggacaggagggagccgctcccgcccgcagcctccgtggagaggacagtctgactccgatgtttccaggcgggtgccgtcagtgaatcacttggcctggtgcaatcccccattctgtacagggctggtgggctggtttatgacccgcgtgactctgggcagctatgatggcaggaaatgagccgtcttgggcgggcctgctgctctcctgggtcaaggttcctgctagggcctgagttctgctggcagcagccagccagccccccgtgacccacaggcctgctccgaggggtgggtccccctgcccttgagcgtgtgaccctcacccatggccgccctcaccttcgaaaacccgcagatgccgcggtctctcgtgcggatcaggctcagagcagagagactgatgtgcagcggacgctgacacacctgtggcgtccctgatacgtaaacctttctctccgaggccccgcttaaaattagcgcactggctcccggtgtcgcctcggccttagaaactaggacgcctctgcttctcgttagctgcagccctcgtgccttttatgctcagcagagtgacgaggccgctcgtggttttctcttctgccctcactcagccgcgagggcccagccgcctttgtcctcctggtggccacggtatttttagcacgctccgttctgagggaggacgggctccaagggctgggcatggcggcaccgctggttcaccctctctcgtcttcctccacaggtgtgcttcccgcacagctgcagccatggggtctgaggaccacggcgcccagaaccccagctgtaaaatcatgacgtttcgcccaaccatggaagaatttaaagacttcaacaaatacgtggcctacatagagtcgcagggagcccaccgggcgggcctggccaaggtgggtgacatcctggccccagcgcggccctccatcagcctgcgccgcgggcctgcggacatcctgggtcccagctcagccagccccacaggcgtggcctgtgcacgtggaatgtgtttcggggccactcccagctcgtttaccagcgcctgtttgtggagttccaacaatgtgccaggcaccattctaggcactggagttgagaagtggccggtgcaggccctggctccagggagctggcagggggtggtgaggacacacagccacactgcagtgaagcccaggggcagtgggccaccaggttgttctggccgtgagctgacgtctcactgagggacgccttccaggggtgttcagtgcccaggaaggccttactttcctagtaaaactttttttttttaagctgggtatggtggtgcatgcctgtggtcccagctatttgggagggtgaggcaggaggattgcttgagcccaggaattagaggctgcaatgagctatgaccgtgctactgcgctcctgccccggcagcagagcaagaccctgtctcaaaaaccaagtcagaccacaccagaaacaatctttttgagatggcagagtgactgggtcaggaaaactcaaacagggcgacagcgcaggtacatagtgaccaggagcctcctccctgtcccgacccagtcccccaccctctccctggaagcagcactgttattggttcttctctctctctctctcggcatattgtgcacgcgtgtacgtgaatacacacagcagacccccgaaccccacatgctgagtatgtacagtaccattctgctcgtctgggcatggtggcccaggcctgtaatcccagcattttgggaggctgaggcagggggattgcttgaggccaggagttcaagaccaagctggccaacacagtgagatcccatctctactaaaaatacaaaaatgagccaggcgtggtgttggtacatgtctgtggtcccagctactcgggaggctgaggcgggaggatcacttgagccagggaggttgaggctgcagtgagctgagattgcaccactgcactccagcctggacgacagaggaagattctgtctcacaaaacaaaacaaacttaaaagttggtgctgcacgtttcacggctctgaaggtggctgccgtggtccgtgagtctctgtgttcgggtgtgggcctgttcgagcagtgctcacccctcagtttggaagatgaatcgtcgttgcattttgggttcttccagttgcctgctgtttgactatcgctgttcttcctcagttaggccaggggttggcgggcagtctctacacacggccagagggtgaacgcctaggctctgtgagccagaaagagcaaccagacgccgtgtgaatgaaagtgcacggccctgtgccaatacaacattattcctggatgctggagggcaaacgcgtattgttttcacgtcttctgcttttttcttttcccccaaccacttaaaaatgaaaacaaacaaacaaaagccttcataactcaaaggctatacagaagcaggaaggggctgattcggcccgagggccgcagtttgctgagcgctgaggcctcctgcctttccgggccgcctccaccctgcccctccctccactccctggttttggtggattttgtcagtagccttcgtctctctcctagtgatccttcggtatcagactcgcattgttatttctttgtctctgagctgtagagcgagggaagcagtctcgcaccatcttttcttcccctccaagatggatgttttttctgttttgagagggggtctggctctgtcgcccaggctggggtgctggggtgcagtgctgcgatcacggctcactgcagccttgacctcctgggctcaagcagtcctccagcctcagcttcccgagtagctgggaccacaggtgtgcaccaccaagctggatttttgattgtaacacaccatgacgatgtgggaatgatggcacatctgtgtccgggtcagaacggtgggggctgctgccgtcccggcttcagttctgtctttaaaaggctttggtcctcctatctcatctcagaccgtcttctctggccctctaggccacaggctgctatcccaggaaaggcccaggtcctcctcttcctcctctccctggtgcacatagggcaggtgggacaggcgtcgcctccctttatcctggcaccgcatctgcctctgtctcctgcccttgacctacttccacatttcccaggatgcagcagccctttctggcttgggatccaaggcgtcctgatgtcaggacgttgaggggaatcagcatctcagaccgccctgcgctcttccgaggtgcctttaaatgcccgccccgtcacttcttcctcatccctcacctcccaccgggctccatgccccggtgtttccggctctctctgccctccacgtggcggccttgggtgcagcctgggttcccgggtggcctgtcctcccccgcgctggcacctccgcttcgtccctccctccctctgcctccttggctgccgcctctttgagccctcatgtcgctgcttcaggtttctgcactccccccaggccagttcccccgagattcttggcaccggcgtcttaagccagtgtggggagtatggtttccctgccttgcgttctgcgtgttccttcccatgcctctgcagcggcagctcccatgctgcttctccttgcaccagtgcagagaatcctttctcaaacccgtggagggggctgggcagtagggggccgtccgggtcccatgctgtggaggggctgtgtgtgcacgtgtctctgtgtgtgtgtgtgtgtgcgcgcgcgcgcgcgcctgcgcgcacaggagactgaggtggggaggcagctctcacacagcccagagagcttggcagctgcagagtcacgttggcacccgcatgtggcacacgcacacccccttctgcagctctgtggggacagatgggctcagggaagcatctgctctggccctgggcagccctgcgtcttccaaatggggggcccttggctcggggcagccagcctctttggagaaggagcacagtgccctgctggttctgagcgagctgtgggggtgttggggtccccctctcaccctggtctgcctgccttgaccactgtgtgtgtgcgtgcatgtatgtgtgtggtgggggagctgggggtttcctggttccatcaaaactgtgtttggttatacatcgcccctgcccccagcagagatctgcaggcccgatggagctcggtgggggcgggagctgcgggcacagccctgagagggccctggagctggcggtgccctgggtgcaggaagccttccactggagttgctgggccctccacacggggtgtccccgaccacttgggaagcactgaggtgagaggagccctggaaggccccgtcgggggtcctgttgggaggggtgggaacttccagtgcccctccacccccaccagctgcctcccaggcgggtgccagcaggggaggccctggctgccctcagctataccacccgccggcatctgcctctcactgttggcatgtggccggtcgccttcctggcctcagctgaatctggccccccaggagccccgtgtgaggcactttcaggggccgccggaggcctggaagacccgagtgtggcagtaggaatgtcccgagcggctttcagtgcctccttttcaaccctccccgcctggagccctccttctggatttgcgtctcggcagattgtgggatgtcacttctgtcctcttccgccctgcgggattttcccagagccttcgggtttgagcccagctggaagtggccctcgttcacgctgcctgtcagcacctgcctgggctgtgtcacctagagtgtggctccgtgtgtgcggcgcagacaccgtgggggtgtttggagcttcctgcgtggctcccagatgtctttactacacagtgcccgccgtggaagggacagatgagcaatgtagcccgaggcgttctttcaagagcagaggaatcgggagcgaagtgtttttgttcatttagcagactaggatcatgggcgagtttcctctaatagcactgaagaggcgaattcacggcttcccctcggccagcggctttggcgtggatttggagccgggccaggttcatggaaccctcctgcagaagcagactggggcttcctggagaggggggacagtgtctgtgtgattcagagcagtgctggcctgtgggtctctgaccataccactcagttctctgtagtaacatctcgtgtctgggacacaggcccttttgtttctgtttctcgcctttccactcctcaatgtcttcgtgtctcactgactcttcagctgctcccctgaaatctaagagaacggcagccccgcagctgccccagcaccctgccatcacacagcctgtgccagggacaggtgccccaggcgccttttgcactgtggccatagtggacatggagagtctccagaaagagccggcgctaagctggactgtcctttccttgggaccggcctcatcttggtttaactctaaattagtgtttctcttcgcttggcactgtggacttggggccgcatcgttctctggggtggcgccatcctgggcattgcagggtgctgagcagcttccctggcctccatctacctcatgccaggagcaccctcagtcgtgaaagccacagacatccccagacatggccaggtgtcccctgggggacaagaccccccctcagttgagagccacctgctcgctgcggctgctgctgctgttactgcttttgctaaagaaacctgtgcatgccggccacggaggcagcaccttcctgtcgttaacaggcacctggaggataagtgttttcattgccaagcaaaacagtttcttcactgatgtgatcgctgggtccttggggacagtaaatggattttagccgttctggaagctgccagcgatgcaggcgtcaacacacagctcttcccttggtggcccggggcgcggaggggcagcttgccagattcctggcagatgagccgaagcgggtgggttagttccttctccctgtgcagtgggtggcccggtcgactcctggaaggaggcgtggggcctgcagtgcccaccccaggactgggtgtggcagccccggagcggctgggagggcctgcacagaagggtgcctggcacccagaaggcccgtggtgcccaccggcagtctagaatctggtcttgtcggcccataggctcacccccaccagaggagggaacatgaggctggggacaaggccaggagcccagggtgaggcgtgtactccggatagccctggtccctcagctcctggatgtctccagaaagagccggcgctaacctggactgtcctttccttgggaccagccttgtctcggtttaactctaaattagtgaaggcaccgggttccggctgcagtgccgcctctgacaggtgctggtccttgtcttcctctgctgtcttctccgcgtgttccagtgtctgaggtggcccaggacctctctggggtggaagtccacgtggccgccaggctagaggtcctgggccatagtctgtctgctcaccccagggtgccccgggctgtgttgtggatcgctgtgtgcctcagtttcttcagcggtcagatgggagctctgccattcctcccacccaggagatgggtgcgctgggccccagcacgctctgcacagtgcccagctccgcacagctcctgtcctgcctcacggcccctgtcccatgtggtgctgtcaccctccctgcgcctgcacttcctgttggctcactccaggcggggcggaggcccatgggggctggatctgtttcccagtgtttcctagctcctagaacttgggttgccccatagtgggtctcagccaagtggagccactggggatagtgtctgggctccaacccctgttctccaggtgcatgtggcccctggtgggctcttggtagccagtgggtgcagttctcacttcctgctgccagagggcattgtgagctgcagcgcttatgaccaagcatgaagattcccgttttgaaaaatgccttaccagggcgcagtggctcacatctgtgatcccagcactttgggaggctgagacaggagaatcacttgaggccaggagtttgagaccagcctgtgcaacaaaatgagactccatctctagagaaaattaaaattttttaaaaaaattagctgggcatggtggtgcaagtctgtggtccccactactcgggaggctgaggtgggaggatcacgtgagtccaggagttggaggctgcagtgagctatgattgtgccactgcagtccagcctgagtgacagcaagaccctgtctcaacaacaacaacaacaaatgcctcaaaatacgagtctctgagcctcaagatgccagaacacacacacgcccagtgccacctatgtttgctgagtctaatcctgcacacacgtgtcagggttggccctggtgctgggggggtgctgtacccagcttcccaggcctggaggatggctctgccctagcaggtgaggcccttgttggctgcagagtcttctggggagtttgataaggcaaatgggggggttcctcgtgcccctggggggtgtcccgaggtgcagatcttggggggtgctggtctctggggagccggtggcacagtctgctctctggccctgccctgagggtctgagggtgccactgactcccatcttggtcttgcagatcatccccccgaaggagtggaagccgcggcagacgtatgatgacatcgacgacgtggtgatcccggcgcccatccagcaggtggtgacgggccagtcgggcctcttcacgcagtacaatatccagaagaaggccatgacagtgggcgagtaccgccgcctggccaacagcgagaagtacgcggggcgggcagggcggacctgacccccgcccccgggggcacacctgctcatgggggccctgggggcagagaaggtgcggtacacgcagcccccacagcatggccggcctgctctgtgtgccccgtgtgggctgtggcgacccctgctcccagggtggatctggaccctctcccggcctgggctgacccacaccgccctcatctcagtttcccagggcttcccagtgcatgtcgggcggtgtcctggtccccggcctgggagcacgtcctccacaccctcctgtgacacctgggcttgtggcccctcctcagagagggctccctggctccacacgggtacatgcacaggcacacaggagggcacagacacagaacacacgagggcacatgtaacacacatgggtacacagggcacacgcacgtccatacacaggcacacacgggtacacatggcacacgcacgtttctacacagggacacacaggctcatgcacaggtacacaggcacatccatgtgggcacacctatgggcgcctacccaggtacacatggcacctgcgtgtaccggcagtgttccgagtacagctccctggttcagcaggcacagccacgtagcctccgtgctgcgcaggcctgtcccgtcgccgtgccctcctctctgtctgtggcctccaccctgtctgtggcctccaccctgttgctctctgaggttcacgtgccttgtggctctggcaccagagcagagcctggtctgtcctgctcacccggccttcccagccccctagtctgtcgtctgagctcagtctttgccacacagggatgacaagagcctcccagggcctctgtcccctgcccactccccctggcgtgtgttctgatgtgggtgccccgggccaggataactgaggaggggtacgtgggtttgggccactgctcgcccgtggaagtgcgctgtcccacccggaagcaggttgcgtggtaccctaggcggggcagcgggcagtcggagcagagcccctcccgcctctttcatgggtgccctgggttccaggtggctgagggtgggctgcgtagcacccaggcctcaccctgagctggttttggggtgtttgttcaccaggtactgtaccccgcggcaccaggactttgatgaccttgaacgcaaatactggaagaacctcacctttgtctccccgatctacggggctgacatcagcggctctttgtatgatgacgtaagtatgaggctccggggaagaacagggaccagcttcctggtgggtggtggtgggagggccctgaacgggactctgccttggcagatgaagcttccaggcaggcaaggttaaccccctcgcccaggctctggatgcgggcctcgccctgtggtgacgaaagaggaagccaggctttctctgatttttgcagggcccctcctgcctcaccctgcagcccccaccctgagctcaccctggccccacctctggcctcagcagccggcccacagcgtgttacaaacacgtgtactttcccagtccctgccgctcgtcttcctggcactgtggagcctcgagtcctcagcccgccaggccacctgctggattcggctccaacccggtcctgacttgggctcagggcccggagacactggggtgaggggatctcccatcccgagcctggtctgctggagcgtcctcttgtccacacagcctgggctctccatgagggcagctggccggcatccccagagtcccagcctcaggcataaggtcccccaggccccgctggacgccagaagtgggcctgcgtggcgggtgtgtgtggaacagcagcaggaagctgtgactgccctgaggccacggccagccttggctctgccctgcttagtggaccttgtctgcgctgtggcccgcaggggactgggtttgctctctgagccgagggcgccggtttatgacacggaggattctgttcaggctggaagtgagcccgccctggagaacctgagggagacgcccccgacatggagccaggcataagccagccttgcttccggccccaccagaagcaaacatgagaccagagtatttcgaatttgagattttctttttttgaatatttgcatatacatcctgagatatcttggagatgggccctaagtctggattagtctgttcttgcactgctataaagaaataactgaggctgggcgtggtggctgacgcctgaatcccagcactttgggagactgaggtgggcagatcacttgaggtcaggagttcaagaccagcttggccaacatggcaaaacctgt[132 bp omitted]gccccgcagcctgggcaaaaatgagactacgtcacaagaaaaaaaaaaaaaaagaaggaaacaaacacctgagactgggtagtgaataaagaaaaggtttaattggttcacgtttttgcaggctctgcaagaaacatggcttgggaggcctcaggaaacttagagtcgtggcaaaggtgaaggaggagctgatccatcttacacagcaggagagagtgagggggggggcgccgtaggcttttcaacagccaggtttcgcgagcactcactgccctgaggacagcaccgcggggatggcgctgaaccattcaggagacatgagcaatccacccacggtgcagccacctcccacccggccccaccgccgacaccgggacctgcagttccacagactcaagtctaaacacaaaattcatctgtatttcgcgtacactttacacacgtagcttgaagataactttacacaaagtttttaataattttgtgcacgaagcgaagttttgactgtgtcttaactgtgaccggtcacatgaggtcagctgtgaaagttttcacttgtggcgtcgttatcggtactcagaacatttgggaccttggagctttttgggttttggatttttggagcgggggtgtcccccttatcccgcacggcgtttatcggagtggggtgtccaccttgtcccgagtggtgtttatcggagtgggggtgtccaccttatcccgcgtggtgtttattggagtggggtgtccaccttatcccactctgtgtttatcggagtggggtgtccaccttatcccgtgctgtgtttatcggagtgggggtgtccaccttatcccgtgctgtgtttatcggagtggggtgtccaccttatcctgcgcagcatttatcggagtgggggtgtccaccttatcccgcgtggtgtttatcggagtgggggggtccaccgtatcctgcgtggtgtttatcggagtggggtgtcaaccttatcccgcgctgtgtttatcggagtgggggtgtccaccttatcccgtgctgtgtttatcggagtgggggtgtccaccatatcctacgtggtgtttatcggagtggggtgtccatcatatcctgtgtggtgtttatcagagtgggggtgtccaccatatcctgcgtggggtttatcagagtggggtgtccaccatatcctgcgtggtgtttatcggagtgggggtgtccaccgtatcctgcgtggtgtttatcggagtgcagtgtccgccatatcctgcgtggtgtttatcggagtgggggtgtccactgtatcccgcgtggtggttatcggagtggggtgtccaccttatcccgcgtggtgtttatcagagtggggtgtccaccttatcccactctgtgtttatcggagtggggtgtccaccttatcccgtgctgtgtttatcggagtgggggtgtccaccttatcccgcgtggtgtttatcggagtgggggtgtccactgtatcccgcgtggtggttatcggagtgggggtgtccaccttatcccgcgtggtgtttatcggagtggggtgtccaccttatcccacgcggtgtttatcggagtgggggtgtccaccttatcccgcgtggtgtttatcggagtgggggtgtccaccttatcccgcgtggtgtttatcggagtggggtgtccaccttatcccacgcggtgtttatcggagtggggtgtccaccttatcccacgcggtgtttatcggagtgggggtgtccaccttatcccgcgtggtgtttatcggagtggggtgtccaccttatcccgcgtggtgtttatcggagtggggtgtccaccttatcccacgcggtgtttatcggagtgggggtgtccaccttatcccgcgtggtgtttatcggagtggggtgtccaccttatcccgcgtggtgtttatcggagtggggtgtccaccttatcccacgcggtgtttatcggagtgggggtgtccaccttatcccgcgcagtgttgatcagttcatccgctgacggacatttgggctgtgttctctttttggctattttgaataatggtgctgtgaacgtttcttgtgtgtttgtttctttgtctttgagacagagtcttgctctgtcacctaggctgcagtgcagtggcgcaatctcagctctctgcaaccttgcctcctgggttcaagcgattctcctgcctcagcctcccgagtagctgggattacagtgtcacatggagtcatcccaccactctaatgatcccctgagctccccctcgtcattcctccctctcccccatccctctcctgcgccccaggcaaccactgatgtctcactgtctccatagctcagccttttccagaatgccgtgagctggaatcctacagtcggtagccttttcccattggcctctttgaccaagcaataggtgttcaagtttgctccatttttcatggcttgagagctcatttcttttcagcgctgaataatactccatggtccgggtgcaccacagtgtgcctgctcattcacctattaaaggacccttccaagtttggtcaatgtgggcagaagttttcatctcctttgggtaaataccaaggagtacagttgctggaccacgtggtgagaggacgtttagttttttaagacgccaccaaactgtcctcccgcccacctgtcccactgtgtgctcctagcagcagcgaatgaacgttcccagggccccgcttccccgcccccatctggagttgtcggtgttgtgcatcctggccaccctgggaggcgtgttgcgctgtctcattgccatttcaatctgcattcccccgatggctgccttcgcggcggggcccctttgcatgcctgtttgccatctgtgtgtttccttggtgagctctcttcatgtcttttgcccagtttgttgttgttgttgttgttgtttgagatggagtctcgctctgttgcccaggttggagtgcagtggcgtgatctaggctcactgcaacctccacttcctgggttcaatcatttctgtgcctcagcttcccaagtagctgggattacattacaggcgcccaccaccacacccagctaattttctttctttttttttttttgagatggagtcttgctctgtcaccaggctggaactacggtgcccaccaccacgcccagctaatttttgaatttttagtagcgatggggtttcaccatgttggccaggatggtctcaatctcttgacttcgtgatctgcccgccttggcctcccaaagtgccgggatttacaggcatgagccaccatgtccagcctaatttttgtatttttagtagagacgaggtgttgtcat[134 bp omitted]ttctggttaaatttgagagtttgctgtgtattttggttatcagttgtgacttgcaagtattttctttctgactggggcttgtctttctcttacggatcctgcctgattgttttcaagtgaaagttcagcctcagactccagtgcatgagagcctctgggttggctggcctgcactgcctgcacttggcctgtagtgatgacccgggagggactctgcagccgcacgcaggctgtgccagcccaggccgacctgccacaggtgccaggggaagcttcagggcttccttgccatgtgtttgccatgcctagcctatgcactagcctacttttacagcgggggaaacagcccacagcagagaagcgacttgctgtggtcccaggatgaatttgcgcccagctcagcctgtgcctggggcctccctctgccccatctgggtctcatcactgcctccctcctcacctcttctgggctcctgccagggctcaccttgcaaaggaaccgctggtcttgccaagtctgagggccggtcgtgcaggtgcaggaacagctggtggggggtggattcaggctgtgagagcagctcacgttcatgtgtgtctgggctcctctcggcctctcagcaggccatgagcctctccggggactgcagtgactaatgtgtattttatgagctcttgggacaggacggggtttgtttgcttgtggcattaagaatagatgtgcctggtgggtggggattccgtccttgtttgcctagttctgaaaactgtcttcgtctcctcggtcagaagctgtggaagggctgtcactgggccttggctccggtaccatcgctgggttagccccaagtggtgactgtttttctccttccgtgtcattgacttagaggcgtgttaattatgcactcccaaactgcaggcttcacaacaaggcctccacccagcaggaagcacgcagctcagtggaatctgacaggccctgcctgcctggtgcacgctggcatgtgcgatggggcccttcctggaagggccaagctggcggtgagcccttcagaaaaggtgtctgggctgggtatggcggctcatgcctgcagccccagcgcttggaggggccaaagtgggagggaccattgagcccaggagttcgagaccagcctgggcaacagagtgagacttcatctctacacagaaaaaagtaaaaattagccaggtgtggtttctcacgcctatagcctatagtcccaggtactcaggagactgaggctggaggattacctgagcctgggaggttgaggctgcagtgagctatgattctgccactgcactccagcctgggcaagaatctcacacaggttaagaccagcccctggtctgcagggtatgaccggcccctgggggggccgcagatactggggtggaggaggatgggcagcgacccctgggactctggggagaattagcctgcaccccagggctcgcaggttctgggggtggccgggcggttgccgacgctgctctgccgccccacaggacgtggcccagtggaacatcgggagcctccggaccatcctggacatggtggagcgcgagtgcggcaccatcatcgagggcgtgaacacgccctacctgtacttcggcatgtggaagaccaccttcgcctggcacaccgaggacatggacctgtacagcatcaactacctgcactttggggagcctaagtcctggtgagtgtctgcactggccctgccgccggccggaccgagagcccctcgggagggagtcaatcccgggtacacggctgggcgccgtggcaggggccccaccaggtgaggccgcaaaggtcggcctatgacggctggagatcttccggaccgcctggggtcacccaccagctttggggtgggggatgtgcacccccagagccgaagctcccaggcccctagagcttgcgctttgtaccccggagtgccccccattgagctgtgagcggccccaggtgtccccatggccaggagcgtggtcttgagcctcctgagctgcccaggctgtgctgcctcacagccaagtggagacgttcctggtgaagggacactgtccatgctgcccagaggggcctggccaggatgaccctgcagccgctccctcgcagtctccgccctggcacgtctgggccaggccctacagttaggagggcagggcgtggcgctgcaggcctgtgtgcagtgtggtggacctgcccctgcccgggaggtgccgggtgcagcgtgggcgctgctgtggcgggctgagttccaggaccttctcctggctccctgtgcacgtcgcagcgaggccgtgtgggggtgtgtgtgaatgtgcacgtgtgcgcgcgcatgtgagtgcgcacgtgagtgagtgtgagtatgcatgcgtgtgtgtgcccctgtgtcaccgggctctgcttgtgactgcggaacctgctgggtgctccgcggggctgccctgcactgtcctccaagggccgctaggtggcgctcccgcccttcccggggccgcgctcatgcctggaatcttcccaggccgtcctcgcgctggaggaggacggagcctttgcctggagggcgtgggagctccgccttgcctggcccttccctgggttggagttgtaagcggggagaggggggggcgggggagaatgctgtacctcttcgttaaaaaaaagcacaatgagcaggaaggggcgagctgtgcgcatcctcacctgcgtccgaagcgcagatggagcccaagggaaaggccctgtagaggaccccgtgtgacttggggcaaagcgtggcctcccaggggtgcgtgggcagcgggacgcccatggtgtgaccgggtttgtgcctccatagggaccgtctgccctgtgcagagagcccctgtggggcgggaagtggcgagcagccggcaaggaggcccagccagacagaagcaggggggtcagggacatgggaggtgggggaccagccagtgagtcagacgtgaggacttcagtgccaaggactgcagtgccagcagctcggtctcctgtgaggggccccgggggttgctggctgtcgtgggagcctgggctgggggagaccctggggctggggctgctatgggtcagatgccagggccgggggtgcctgctgctaggtcagaggggcctctgcgggaggaggcgacagtggctccctggaggcggcagtggggcccggccacaggccgtcggagggactgacagggatgcgccaggagccgagggcctctcctgagctggttcatccaggacgcagcctctgagggcatcccgcacctctccccgaatgcccctcactgcacccctcctctgcttcgcctggtgccgcaggcgtccagctgccactcccatgtctacccttccccatgacccgtcgtgggagatggctcaggggagacagctggggcggggcagcgttgagtaggcaacagttctttcgggaagggaattccggaagcgccctgaccttggtcttggtttttgcccaggaaggggtggggatggcaggggtggggcctggcatgaggggcctgagaggagccacagtgtaggctctagctgcagggcatgccctcaaccccccagagctccccactcgcccccacagtcagctcagcctgcttagcacgcagggccccttccctgctctctcaccagggctgaggcggggccccagatgttcccacgacaccccatgcctgcgacaggcatagaccaggtgaccccagcattagccaacgtctactacgggctatcagtcctccccagcagatggtaggggccctggtcaccccgtgtcccagctcccagcaggggcctggcacagagaggcttggtgacttgccggagcctcttggatcctcactgtgtgctgtgggagctgactacccctccaggctgccctcccaacttgcaggggggtggggacaaggtaactggaaagagtgtctggcctctggtccctgggctggggttcaggaagctactcaggcccctgggagatgcttcccccctctcccttcctcgggcccttggggtaggtagggctcccagccaagagatcaccaaggctgcgccccgtctgtctccctcattacactgttccgcttgcatctgcagccgcttaattgcaaccatttcagagtattccagtgggattttaaagaaagtgtcaatgtactcaggtttacagcattttattaaagctttctgggtctgttgctactttggtagcttgatttgtgtgtcaaagtgacgtgaacagcctggtgtcaataacaggcagaaacatgcttcaaaaggctggcttctgtggtgctctcaggcagcggggctaagaatatctgaagagactgagcgcctcaaaatctctttggcaatgcggattgaaaccagagccagcacctgcaacttccccccgccaacttcccgcagccccttctgtcacccaggccgggggggccggagtgcaggtgggtgtggggagggtccgagctttccacttgaccctgtattccagggtcttcctgggtggggtggtggcctggggtcggtgtcctgaaggctgtgccccatagaagccactgtcccaggccacactccttgccatagatcaagactctcctggggccaggcgcggtggtttgcgcctgtaatcccagcactttgggaggct[134 bp omitted]gaggcaggagaatggtgtgaacccaggaggcggagcttgcagtgagcggagatcacacccctgcactccagcctgggcgacagagtgagactccgtctcaaaataaataaaaaataaataaataaaaagaccctcctggaacctggggtgggggtggtttagccgagctgaccctccaaggccggtcctgcggctgttcccctccaggcatcccctccccaacctgcacctgtggcagcccctgcagggcccaccctcctgagccgcccgggccaggcacgaaacacaggcgtcgccacgaggctgagcgcagtgtcgccagcagcatcacatgccacatgcccctagaagagagttccaggccggggtgggaggatgttgggtctcggccagccctgagagagttgctggtcccagggcacttctgggtcattcggattgtgctgtgcaccccaaagaagagagtggagtggccatcccccctcgagggccctggcccacgctgcctgggaaagtgcccactgttcagtcctgtgcacccatgtgccgggctgggacctggccgaggcttcgggtccccttttgcccccaacccatcagacaccctgcagggcagtgttggggtgtttaggggactgtgggccaccgccaagagcagaagctttggctctcactgcagcagggaagccagatgggggatcagcatgttcctggggctgcagggactcccgaggacgtcgtgagctgatgggacatggtcagctgcttgcactggctccaaggcggcgagaggaaggccctcctgaggagtgccgcggggccagcgcaggtgcgtggcagccacagaggcctctgctcaggcttagggaagggggtgtcccccagggtctctgcagctccgcttgtcagaaggggggtcatcctgcacccaggtgaagcccccaagagcagcggggcgaaggagcgcttgcccggactgcgaccttgacctgcccatgacccgcggcagtctggaaatcccccattgccccaggcaggatgggggtcccccatggtctcatctctggctgtttcctcaggggatcgctccgcccaccctctcctgcctctgtttaccttggacacactcagtctccggtgcaggtgtgggaggtgggggtctcggagcttgtgctcccgtgaagggcacggagcccccagttgctcttggccatcctgggctgctatgagccagaccctcctgagtgctgcggggagggctgctggggaggccaggggagaggggattatcagaagactccaccagcctcccttgacctttaaggagctgcaagccgagaattttcccttttgattcagctacaccttgagttttctctctggcgttttccctcatgggaatttcacagcatcttttcttcttgctgccagggaaacttgagtcctagcaggcatagccgtcttttgcttcatgggtgtccctggaggtgtgcgtgcatgtgtgtgtgtgcatgggcgcatgtgtgcaccgaggaaccgtgctccagacactgggggtgggggtggggagggtgggggtggggagggtgggttccagggctgcaggggaccagcccgggcttcctgccctgtggccgcaggtgggtggaaggcagagcctggggtggatgagtctgtcgcccacccaggccaagccaggctgttcttggggtggaggctgcgggcctgctcccttacccctctgctgcccgcctaactgcccctcaggacctccctggcccacccgcctcccagctccatctcctgctggcagctcctgcctgggggcagacacctccctccctcctgggctccctcagtctggctgcaggtggcactgtcgggccccacaatggcctctgccctgtcccttggagtgggacccaggagtctggtgggtgatggagctggcgagcccgtcccaggcagcagcctgaaggcccatggggtagcgcgctggcgcccggggaccctggtgtgggtttgtactgctgctgctggcgagccaaccactgggacttccagcttctgagcccgggacccggggggtcccaccagcagtggggacctagggtcccagtctactgaccgtaaggcatggcccccctcagtgacctggggcattcctcccagccgctttgctctggctgggccaccagaggttgggtggccgcagagacagctctggcggagattggtgtcccgacaggggtggcgtagcctgagctgagcactgggttgaaatggaaattgcctggagcctgacagcttcacagattggttttaataactcagcttccccacactgcactctgtcaccagaacaagatgcaggagcgagatagttgctccctcctctccttgccacccgaggcccaaccctggcgagggtgcctagggacagggctgcattggcagctcagagccgctgcggtgccctgggaggtcagactgagaagacccaccagactgatgggggcagcccgatgcgtgcctcgctcccaggcaggggaccgcagccaggtctcttcccagccacacacactgagccaggatgacagaaatagaaaaggaagaagcggtttagaacagagagctcccacggagagcagatcagaccagtagggaggcagagggaccctggtcattagaaaatgataaggtgtcaggagccaaggcagcttgctcagggcccaggttcctgcccgccaaggcctcagcacttcctccctggctcactgagacccgctgcagtggccccagcccatggtccctgggagccgtatccttgtagagacagctgtctagcctgcatgaggttatctggggaggctcttgatgaggggtgtcccctctctgcagaaggaacctctttttgagagaagacagttgttgtcacaagcaagtgaggcccccaggcccagtgcccaggccagctgctacgcctgagtagtagttgccaccagcccagaccagccactaccccccagcagcgctcagcaccagcccaggggcccagcgtcccggctgactggctctgggtccacatgggttgctgcgtggccaggcacacctggtgcccagcttccctgtttgaggagcgtggccgtgggcaggcaggaagctccttcgtggtcacctgtcccaatcctctgcttctgatggcgactgtggccacagcatcagtgcagcggttctttattcctgtgcgtgagtgggcctcagtgaccagctcagctctcctagctttatttattttattttagatgaagtcttgctctgtcatccaggctggagtgcagtcgtatgatcacacctcactgcaaccttaacctcctgggctcaggtgatcctcccccttcagcctcctaaatagctgggaccacaggcacgtgcacaactggcaaatttttaaattttttgtagagacggggtctccccgtgttgcctgggctggtctcgaactcctgggatcaaatgatgctcctgcctcagcctcccaaagtattgggattgcaggtgtgagcccaaccctttcccagttttaaaactggaagtcccatatcctggaacctgctcagatccagtgaactgtgatgctgagtcccctgagagagagagaatgtgtgtgtgtgtgtgtgtgtgtgtgtgcgcgcgcatgcacatgcgtacacatgtacatgtgtttgttagagaaacaagggtctccagtcacatagtctgtctgggagggagtctggccccctgggactctgcccagaagacgagacctgggagtctgctgggtaactgagaactggactttacccacttagctgcgagaactcgggccaggagctgagctgccagcagggcattgcagccgtgtggcctagagcgtggcgtgtggcgctggtgccgtgcttgggtaagtggtccaggctgcggccaggagggccggcacatgggagctatgaatggcagctgtgttttccctggcctggtcccctccccagccctcatcatcgagccctctgcctcgctcttgtcactaccactctgtcggcctgacgccatcagcccaggcctgcttatcaagactggggagtgaactgagcaccagaagctggctttggcgttcaaaaaattaactcgtgatgctgcaaagacctttgagcctcacactggggcgtccacagcgaggctgggattgcatctctgcgcctggcgtgtggggcacaggtgccagaatcacagcttctccggctggcctgatcagcctcctgccaacctcactcacgttaagcaattgcggcccgattgtgcccccaggacaggcagggctctcagctgtgtctcgtgatggtgtccccaaggactgggagaacacctctcggccagggtgaccgggaaacccggggcacatcggggcactcaccggggctcccaccgtacctgtcagtgggatctgtcccagcaggctggctcctggctcttgctgggagctggcagggacagacacagacacacttggtgtttgttcggggactgcagagcaattttcatatcgccttttgctgtgtgaaaatcgcactccaagctctcctccagagccgtgccactgagctggggacttccggtgtttggatggtcgattgccctgtgtgtgtctggacagcaggcaccgttgcccatggatttgggaaactggcttcttggtgagcagagatggtggccgtgatgggggccgggtgggcaccccgcagcaggcgagtgtcaggcggtgggcccgtgatgggggctgggagggcgccccgcagcaggcgagtgtcgggtggtggccgtgatggggactgggaggacaccccacagcaggtgagtgtcctgcaggtccctcttctcattcttgtcccaggcttgtgcttgtgtttttcatccactttttggtgaagtcttctccccctttctctctctttaaataggtctttattagacctgttttagattcactgaaaaagtgggaaggtagtaaccacagagagttccccaccgggttccctgttatgagcattctatatcaatgtggtacacttgtgatcattgatgggccaacactgatgcgttatgaactaagatccattctccagatttcctctgtcttcccccgttgtcttttctgtcccctgaacccatccgggtcccacgtgatgttgtcccgtctccgtagggccctgggctattacggtgtgtttgatgccctggacagtgttgaggagggctggccagggagtttatagaacgtcccctaatctgtatgtcccctaatcagcatgtctgatgtttttcttgtggttagattggggtgatgggttttagggaggaagaccacaggggcgaagggccctcccatcacatcctaccaagggtcaaaggcgcagccatcagcgtgatgtcactgctgatgttggccctggtcacccggcttgggtgtggatgtccagtgtctccactgcagagtggcactcccccgctttccatgctgtcatctgtgaatgtcaggcccaccaggatcatctccctttctttcttttttttttttttttttgagatggagtcttgctctgttgcctaggctggagtgctgtggtgtaatctcggctcactgcaacctccacctcccaggttcaagcgattctcctgcctcagcctcacgagtagctgagattacaggtgcgtgctgccacatttggctgatttttgtatttttaggagagatggggtttcaccatgttggctaggctggtctcgaattcctgacctcaggtgatctgcctgccttggcctcccaaagtgctggcgttacagacgtgtgtcactgtgcccagccacctccctttcttaaggttaactgatttgggacctttatcacatcttcgagaccctcacggcagcagcacggggcatgtgtcactcgaggagtgtgggagccctggggcggggagtcctggggtgtctagagccctggggtggggaccctggggcggggagtcctggggcggggacgctggggcggggagtcctggggcggggagtcctggggtgtctagagccctgcctgtcccggggcttcccttttgtaggcatttcttgctgtgaaacatgatttggtacagaaacggacataaagcatgtaagtaccagatatatatgcgtgtgtgtgtgtgtgtgtgtgtgtgtgtgtgtgtgtgcgcgcgcgcgcgtatgttagcaaatgactctccggctgtcccctgtgtacctcgatgtcaggacacggcccccacctgtgcctccttttcccagccccctctgcacactgtggtggtggcttcctcccggctctgctggcggcgcccttgcctctcccctttgccaggccgcgtgtgcctgtggcccgggcagtgaggctgtgtgttggctgcattggaaggtcttacaaatgggctgatttccttgcgtttctgctcaatggtgtgtgtgtaagattcatccggttgtgtgtggtggcagtgcactcattgtcatggctgtgaaattccccactgtatggctggactttagtcgactttttccattctgccgtggacggacatttgggctgtttccagcatgaggcttctgcgaaagacctatcatctcttcacctgctgctcatgtaagaaattcattttgatcgtaagccttgctatcagtaactgtgactggggctgcatttatgatgttccgttcctcatgcagcagctttgcctggagtaaccctttgacttgtgcccctggctccacgtccttgttcacggacgaggcacagattgaagagacgtccgatctgcccttgaagcgctgccctgtgggatcaggagggcagcgggtcctgggagcaggtgccaggacgatgtgcagccttgaggacagggtgtgtcccaattggcgagggtggcctgaacccgaaggtgtgggtgaggaaggagccatttctaatggagtcaccatattaagccctgcttagccaaacttgaaggtgacagtttgttgtgggacatggagatgatgcagggatgcggggaccgaggccagcatgtgtggtgtccaaggtcgccctgggtgctgctgtgtaggtgagggaagagggactgatgggctgcttagggggccatgtctgagggcagggcccaccacttctgcccacacctcattggccagcacccagtcacgtggccacaccttgcatcaagggaggctgggaaatgtagtctgaccacatgtccagctgggaaggggcaggtgagacttctctttcctgccatgtgggtgctgggtgccctgcaggggctcagccaacagggtcttgaggttgaagagatggatctgcccaagccctgacggagtgctcatgcctgctcagggcccagcatgagctgcgtcaggagcagaagccattgggaagggcttttggtgtggccgggcagccagacactccacgcgcaacccccagagcagtgccaggcccgggagcccttgggatggaggcagggagaatggggggctctgaggactgagggaggaggggagcccggtgaggggaggatgggtgaccagctcaggagcaggggcgggaagggggcatagaagcttcctaagcaggggagctactactcttggccatgttccaggaggatggagtggctgtaggagcaggctttcgggccagggcctgggtgtggtgggagccggggctggctctggaccctgcaggggctgccttagcctcacgctgtctgaccagcccctgcctcacgtcgtgtgctgagtcctgtctgcggcccctcgctcacccgctggcttggtctggcaggagcagatggccttcattttggagtcttttgttcaaagcgggcgcttcgggttggagtggcagtgcacacgctggctcgtgtcgcttgtgaggctgcaggatttttgttttagggaggtaggagccaaacaaacctggcgcccgcttccaggctgtggcatgccaggcgagtcaccggcatcctgtccctgcccaccgctttaagaaactgttagttctgtttgaaatgtcatcactgggcgtgaattcccatcttcagataatcccgccaggcggtgtttggatgaggagtttattcaggctgtgggggtctgtgcgtgcccgcgggtccctcccactgcagccggcgaggctggccctgacccagagtcgcccgcccacccagtctacgtaggcattagaggtttgggttctgagctcagggcctggtttccatggcaaatttctctcccttcggcgaggctgctgccggcggggttcagctccccagaagggagatggcagcaaatctgcgggaggagagtcttcgttatctttgcttaaaaattgggcagcgcatggcttcctcccctccacactcgccagcagcaggggacaggagcgctggctgccttctgatgaaacggggcgggcgcaggatggggccgatgacagcgatgctaatggccctcattcagcagcctcccgccgagggctcgggccgcttgttctccctgacctgattgcgagccaagcagacttaacccgtgtgtgagccaaaccctcccggagctccagagcccagcccgggtccccgaggcccagggagggacccagcatcctgcggcctctgcccgtggtgggcacaggctgagacttaggtcataggaacaggagcgcgtagcctcatggccatcggcctgtgtgtgagacagttcaactcccgtgctctccaaagctagtcccatcattacacgcgccatttaggacgctccaggccatctcggtcaccaggggcctggcggtcaccgtgtttcctcatgaggctcagtgggtgctgtgtgtctgtgggtgccggtgatgaaataaatgtaagcatagaggcatcagagcattttaatagatgggagcctccacagcctgcaggtatccagacgacgttctgcacacagagactcagactcccaccagggcctcacgccccactgcctctccgggatgcctgcgtgtggctcactcccaccacgggcacatcagccctggtgcccagctggccttctgcagagcctggtgctggagcagcttctcgaattctctgctgcctcctccccacagccttccagggcctcagagctgctgccaggccagcacctccttgggcccgtgttgaggccccacggggctgggctcatgtgggagctgatcttgg[138 bp omitted]tggtgaaaccccgtctctattaaaaatacaaaaattagccgggtgttgtggtgggtgcctgtagtcccagctactcgggaggctgagacaggagaatggcgtgaacccgggaggtggaggttgcagtgagccaagattgtcccatccagcctgggtgacggaggaagactctgtctccaaaaaaaaaaaaaaaaaaaaaaaaaaaaaagggagccatgattgttctccagctgcagtccctgtctcttcagaccctctgtgctcttaggagactgtcgttgttctctcctttttaaaccatcctgtgccttttaacagaataaacggcaaggggtccccactgaggtcgaataatgctggaggagggccgtgggtccaggcatggtgggggctgcctcctggttgttgatgagcagaaattcaggccggtttgacggcaggcacgtgagggaggttgctgtgtgtcagtggccctgtgtccctggcactgtgtccgaacctgacagccgccgctgtgtcactgggcacctgccctgcgcaccctcccctgtgacgggcactctcacagctttcctggcgaggctgagggaaaaacatggcaaacaactcgcacatgactttgcgtttttggccttgtcatataataaaagtaatttgtgggcctaaaataaatcagggctggggatcagatgcctccaatctggcctttaattgcaggcgtgacatggcttgcctcggcgagtctgctcctaattaaagtgggctggcggtgtatgaagttcgcacggatcctcagggtgctgacccagccccggttccggagggccagtgtgacgacacctcgtggcccaggagagcagggcgggccacccatggccaccgtgccaggaatggggtcttctggctggccctgcgagagccgagagctctgtctcctccgcctgctgctccgctttgtcgggcattcctgtgggcggctctccccatcccaggctccccatcttccctgagccgaggctcccaggactctgctggtctcctgtgtgtctcaataaaaggtcattatttgaaatcattgtcaccactggtttaagataccaaattccatcatctcttgtcccgtaaaacgatccattaaagataaagccactgcagctcaataaggctgtttcctgggaacaagccaccctgctccctggcagatcctatctcccaagcaagtattagtatctgccacataaaggagcccctgtgctggggacaaatgagggaggtggcctttccccaggatgaggctccatgaaagaagatttttccagtagaaacaggcaggttggctcatgcctgtaattccagagctttgggcagctgaggccagaggattgcttgagccagccactggagctcgagaacagcctgggcaacattgcaagactccatctctacaaaaaaagaagaaaaaatcagctgggtgtagggcgcacacctgtcatcttttagctacatgggaggctgaggagggagtattgcttgagcctgggaatttgaggctgcagcaaagaccctgtctcttaaaaaaaaaaaacaaaaaacaacaacaaaaaacaacaacaaaaaaaaacagaagaaagaaatagggtagctttccatcagatattggaggagttctgtcattgccttgggaggagccgtgcagcccaggctgggctccatttctgcagcggtggcatctgggggagcagggctggccccgcagaatgccagggctggagccttccccatggggcctgcacctgctctgggactcccgtttctcctgtgagtctttgcgaaagggtctcactcctcctcttcctgccctctgtccggtcccctgtaatctctccctcccagcaggctgcggttggtgacatctcctctccctctctctcagccaggatatgggacctcagtgctcttggcagttcccgggctgtctgtgtgtcctggcctgtggatccactcccttgcctgtgcaggcactttttctaacatctttatctctccagactgacctgtggggcagctgcctgtcctgggcgacccatcctcctggggtggccatcggtagcatgcctttcctgctgctggcgactacgtgatgagctctggcacctgcccttcctcccgtccgtccccatgcgctgttgcaggggtgtggaggggttttacccagggaggcactggcttcccaggtcagagcctgtgagtacagcaggcaagtgcactaccaggtctgtgtgtggccttgtttgtggagagaattcctgctccaccctagacgagggacaggtttaccctagtgggtttagagtgttctgttaatgttctttctgctgtagaggaaaccctctttttgttgacttttttttttaattaaaaattctgccaccttgctgggctgtgtttaattctatagttttaccagtttctttgtttgcttagatttcctaagtagaaacttatgttataattaaactgttttttttttttttttttttttagagatagagtttccctctgttgcctaggttggagtgcagtggtgcagtcatggctcactgcagcctcaacctcttggactccagtgatcctcctgcctcagcattctgaggagctgggaacacaggcatgcaccatcacgccttacttagacgtttatattatgattttaagaagtttgtcttatcccttctgcttggtaaaccctttgtctttttcttgatatatcacattggctagtgtctctagtgcagtgtgacgtgtgctgtgatgatgggcaggttgtgtcctctcctgcctcgccatgaaggtggtagtgggagagtccctgctagtcctggttgcctgagaatttttgtaccaaatgctttggaatttttgatagatattaatttttggaatgtctttgcaaccttggagataaactcttcttggtcttgcaatagcctactgtgcttgactcactaatgctgtatttaggatttttacatccacgtgggactggctgatcattttcttgcgtgttctttgttggtgctggggtttcccatttgttcatttattcatccatttggaaaatatgccggattcagaaaacgagctcagtaacgtcagatattccctactgcttgccaaccatgtgtgtacatgggcactgtccctttagatgaaggtcatcgggcaggattcattaaaaccacctgggctggtgccttttccagagaggacatctgtgacctggtctcttcagggtttctggtggggcctgtgttgacttggtggacaccctgggctccacagtgctgaagatactctgaagagccaagtgcatctgtggcactgagcccagcaacgcaggcagggaccgtggctctctggtccttgtgtccccagtgcggtgaataggtcctcaggttcctgtgaacagctttgtttgtggtgcagtttccatagcatacatagaaggcgctcagagaacttggccatttccgtggacggagttaacacggcgcagcacggtggccaccacacagacctgtgtgtccctggcccggtcaccatgcggctctgaggagcagagcagaggagccaccctggcccggctcgtctttagctggctccgggactgcatgtcggctgaggggctcgtgtggatgtggggctgagacagcagctctctgttgggtctcgcaggaagcccaccctgtagccggcttgctctccttcccggcctgtgccagccacagggcagtgcgccagagccatcttgctgggtcacaggccggggccaccatagggctttgttgcgagggtggcggtcaccatggcttttccgttctgtttgcaacttggggtcccgggggcgccactggcgtttggatctgccgtggccctcctgggcttgcgtgggtggctcactctgccaggtggcctctgtccaacctgacacctggtctcgggtacttccagcgtgacgtgcacgggctctgcctccctcattctgtgtctgcgatgatagcgcattaaatggcgaaggcccgtctgcccaggcctgtgcagacactgtgaaattaactttctcaccctccagcacgcattgggctgtgccgacatctctgaagggctcttggtcggacctctgctcttggcacacattcctcggcggcgggggtggggggtagggaggagagcgttttcatccctggcacctaattgccgagagcttccgctggcaggagctgtcaggctgggccgtgggttggattccaagtgccactgtcacctgggagaaagctacacgaatcttaaaaaaaccttacactatgatgtcccgttgcctggttcagagccatccacagggaccaagcaagatggtgccaggcaggggccactgccagaggtgagggccacagagtcctggcttgagagcctccaaggagcccattccgcttgcagtaggagggagagggcgctgggagtcacctggtcgctctggaagtgccgcccaggtagggagcctggggcagccggcaggtgtggtggggacatgtgtggccggcaccagcatcacacccctcatccagagactttgccccgatctcgggttttctgcctggtctgagaggcagcggccctgctgtcattgcctgcccatggctggcaaaggcagaggctgtgaggggacaggatattggacccccacctcctccgcctcgggttccgaggtcaggtgcggtgtgctttggccgtggcaggcggggtccctgggggtgctggggcgtcagccaggcaggcagtgcccacaggcgaagcaggcagccccactgcgcagcgtcacctagcacaggaggggccacagcgcctgctttgcagagaccagtgggggccacgctttcatggagccacatgtgggcccgcctcaggctggggccctgtgggatggtgcccaggggtggcctgggccgtgtgaccccaagcccgtctgctcaccgtcatcgtagctaagggctccctggcaggtcccagctgcccaggacggcctgtgttccctttcctgacacactcatttaatttttaactcaaaggcatttgcttatttattttcattgttcttgataataattctaagccattagaggggaaaattatattcaaaaatgctgtttcacactttatttgtttgatgatttagagcgatagaaaatagcacatttgctggcttttatagtctgataattattcacatccatcaagccattccgggggaataaacaaaacaccaagaaattacactattaatagcatcctctgcggtggacagaaaactctttccggggccagcgtggcggcgagatgacagtggcctgtccgctggctggaggggagcgcctgcctgcagagaacgcctttgctttcattccctggttccggctccagctccggctccggctcatgagctgcccgccatccatcccctcctctgcacggccgggggcttctggggcccatggcaaaggttcgcccacccgtcgccaggagcccctggggaatggcgcgagcagaagaagcaaggctgtcggggcctcgcagcatcccccgggcagctctgccgccagcccagactcaggcctggtctcagctcgctggctgagcctggtggggcatccccaccctctggtctcggtgctgaaacagggacatgcggctcgttgctgcctacgttgggcccagtccttggctgcagtcctgacctcccgtgtgaccagtgtctctggacaccagtcagactcatgtgtgtcaggccgcggggctcagcctcagttgctctctgcttctgggtcccagcccctcgagaggtggcccggcccccactcttgcccagtgggtggctttgaggcttttagctttgcctttcttgggtggcagtaaagtgtaacgttggtgacattcactactcaaaacacctcaaagtgtaaaagagaagctgggaaggtagagggtccgggggctgcccacctgcccgtgcccacccacccactgcccctgtgccggggtgtccttccttctggatctcatgtccttgttggcgcctcacatgtgtctccccatgggcctaggaggtcactgtgctgcctcacatgtgtctccccatgggcctaggagctagtacactgctggaccatcattttgtttgttaaccatcatgtgacctcacgtgtcttgtgtccccaactccagaggggccacgtcctagcatttgtctctcccattgttttattttctcacccacgctgctttggcttgcacatgactgactttccgaaagggtgtccgatgcctgggtttgtttcttgacctcctggtcaccaccacgtatggctctcacggagcttgtggagccttctgcggccagcaccagacaccaagggtggctaccaggtatatggctccagatcccgggctggagatgcggagccgagtttctatgactttgtggtttactgtcttccagaaggacttgtgtacagcattccagaacagagggagtgggtacggggggcagacagccagggctttgagaacacggagatggagaccccgctgggggtgctgtggacagtggtgcagaggagtggcgatgcccgggtcctgggtcctgggtcccgcgtcctgcgtcccggccgatgtgagtcctcagacctcctaatagcattcgccctgatttagaaccagattcctccaggcaaggccaggggcctgcagtgggtgcacctgagggacctgtgcaggccacccctccctcccgaaggctcccctggcagcctcctcaacagtgctgtcttcagcccccgcccagacataccccagggcacctgctccgtgctcggagagcttagcttgctgcaagagtccttgttgcactgagctaagtctccccacccccttaacatttctgactctgccctctgaagccccgtggctgttctgccttgcacagacccacgagattccaggagtcgctcttcctgcttgctttgtcttgacctcttcagcttcttccagcaatccctgtgcgctgggccgcagaccctccgcaccctgcccctggcttagggagagctgatggctgcagagggctggccacacacagccccagtcctggggacgtgctctgaagatggtagaagggagggacacgtacaatgacctggcctccagggctctagagggtgagaggtggtcagcccttgcggggtcccggggaggttgacagagtcagaggacagagagctggtgtgggggcctttgtgtcagcaggaggtggtgctggcatgggggagggaggggagggagggaatgccaggggcttgtgggcagggcccgtgcaggtcatggagccggtagcatctcagagctggacagaggaggtaggctgggagcaggcccggttggggaccagtggcccctgcacaggagccagagggcctgggcagctgtctgtccagaaagcatgcaagaccccgtgccacccgggcacacagggctgtcgtgtctagaaagagatctcctggggtcacgggcaggcaaagctgattgattttggccgtgaagtttgaccttgtgatggaaaccgagctcccagggagtgagacaaactgcctccccgtgtcagtggccaataaacctgacttggttttacagccccgagaaattgctcactaatagccagacagatgctccccctgcctcgagctttagtgaacaaacatttccaaaccaaatagctgcttttgcctttttttttttttttccctccagagccaaggccaaatgtcagggatgccccagcatggccccgagcagggactatgaggagggggccgtgcattcttcgctctttgggggcctgggcggaggaccctgctgagacgcccctctgggaggcccgaaggctccctgagtctcttgtcctgtggtgactgtgggtctctgccgtgcatctgcttcagtccgccagttccatggcccgcccaccagtgccgtcgcaaccccgtcctttggactgggcttttcaggacatccggagagccttggtgtgagaagcaggccccgaggctaccttctggtcccccgtcctggggttggtcccctaagcgaacgcaagcgtgctttcagccctgtgtggacggagcgtggcgcctccagcctcactcagttctgtgtgtcctaagccgtgtcctggcactttctcttggaaactgaggtttttcttccgcctgtgtccttgggggtggccgggaggcaggtctgccagcatcaggtcttctggtccccgaggccgtcgctgggttgttccgagtggcgggaggtgcagctcgctgttgggcactggcggtggcggagcccagaagtctccgtggctgcccggcctcttgtccaagagtcctttgtgatttctgtgggggctgctcctctgaacgctgggcctgcgtcccgcagtctgtgctttctgataacgccagagccacgttccagtgtattaaacttttaacattcgccagattcaattaatcttatctttacaactcccaattacaggcagtaattaagtggagcagcattgtaggctggggatacggcattaatcatcgcagccttggagccataaattagttccttcccgtccccagcatcttcccagaaggagcagagtgtttcattccctgtgcggaggggtctttaatcccacaaaggtgctttggattgggattaaaatttctcatctttatgtaaatcataaaagcccatttaaaaaagaggaatgcacccctgtctagacagtggaagactctctgaggacgacagagttgaaggtgctggggtcgccttggctggggaccctgggagcatgcccagaaattaattatttgtgtcctgttagattagaggctccgtgatgttcgcctcttctctggctcctgccccctccttatttatttttatttttatttttattttttttaattttttgagacagagtcttgctctgttgcccaggctggagtgccgtggcgcaatcttggttcattgcaacctccacttcctggattcaagcaattctcctgcctcagccacctgagtagctgggattacaggcgcctgccaccacgcctggctaatttttgtat[147 bp omitted]agacagagtctcactctctcgcccaggctggagtgcagtggcaccatcttggctcactgcagcctttgcctcccaggttcaaatgattcttttgcgtcagcctcccgagtagctgggattacagcctcctgagtagctggtattttgtatttttggtagaggaggggtttcaccatgttggctaggctggtcttgaactcctgacctcaggtgatctgcccgcctcagcctcccaaagtgctgggatgacaggcatgagccaccgcgcctggcttctttatttcattaaaaaacaaagtggcctttcagctggaaggggctgtagtggagcaggggccgtctcccaccctctgagcttttccttgtcttgcttctgccctgggagggtctcggggagagaccatatcatgtgtcctctcatctgtgtgactgttctagaacgggagctgttggccttgttactctagagttggggtcgaggatgggacttgaccatcctcagctggcactcagctgtgtgccctcaagtccctgaggccctgtcctcgtccccttcgcttggaaattgaggtttttgttttgccggaggccttgggagtgggctgggtggtgtccccgttggcactggggcttctcgctccccctcaaggctgcggctcctggtgcccaccctccctgatgggaagagagtcccaacatcgcaggtctccagcttctggtacggcatgagcgggatgccacccccacttcgcttcgtgtgtttgcacactttcatcttatgtctttcttattcatgatggagccttggtgatctttcaaatgtaaaatgtgtaaaaataaaacttacaaagtcggtgacaaatgcagcttttctcatttccaaagctgctttttccctgttggctcccagtgccgggaaagggtgacgtgggcctggagaccgtgacgtgggcctggagagcgggctggcagctccgggggccccagatgcttgctgttccagactcggccctcccagggtcccctcgccacccgcagttccaatccaatacttttgttttttgccttttcagcctcctcgaggtggagtgccgcttaaccgggagcatccccactcctggctttctgagtgtgtcacaagccaccgagccatggtcctcactccccgctcctccacctgccccacctcgcttccttacggattccgtcctgaaagcccccacccccggccatcccctccacacagtcctgaccatgactccactttgcttctgccctgggcactgtctgcgtctccccaaggctggtcccaccagggacacccccttgcgtggctgccaccgatcttgcctctgacgtgcctcccttctctcgcaggtacgccatcccaccagagcacggcaagcgcctggagcggctggccatcggtaggtgcctgccctgagggccccagggacctgggaccaggtgggaggggcctgtgggtggggaagggcagctggcgtcccccgggctctgctgcggtctgggtttgggttttggggagtggtgacattctttgagccattactgtgtgattttttccatttcctcccaccctcgtggtcagattcacgcccttctgccgcgcagtttgtctcttgtgaaattcgcacagaatgcccagacgctcctgttttccagttttcttagcgcaaacttcttgggcctggtcaaaggctgccagggcccagggagggcagcctgtgttcattttcctcccatcacctgaccccacactgtgcccttgctaattctgagaaagcctaggaaaggagacaattcagccagcagtccgcttacctgcgggggagcagacatggtggccgcacggcgtttgcccttgttctgctgggacccaacctggacacctttggcaaatgtcctcactggtgatgccaccagctcgcgttcatgtgctccctggggactcttgggaaagaaggggtttgtcatagagggtcccagcatgtgcctgagggagtgccagatcctcaggttgtgggatacttggaaacaagtcagacagctggagacacccgggatggggccaccctgagctcccctgaccacccagccctgaggcacttgggcagggtccccatgtcagcgccggcatcacagcacaacaggggtgcaagtttcatgacacctcactgctcctaagtgcctggagagtcatgaaaagacacagctggctaaagcagttcctccctcccgctggtccattcccagctgctcaagagctggctcctccgcattggcaggtggacagcttggggtgcgtgaggggtgagggtcagtgagggcccgttgttcctctgacagcattgagagggccctgtccgagcaccccgcccttcaaggacggcgtcaggcagctcagcaagcgacagccacagcttttccaggagctctcacccagcctcagtacaggctcccgggactgcctggttgctgtcctctgtcccttccaaaccttcgagccaaaggacgcccgccacatgctctcttcccccttcccatgggcttttggctttggagatgggaactgtcagtctttctagggaaataagggtctcctgtcccagagactgcgccaggagtcacgtggctgtgcaggaaatgttgcccaagcgcggcagattcggtggtggggacggaggggaagggagtccttggggagtgggctgggccctctcctggcatgtgctctcctggcttctggactgagggctttgctcttggtatttttgagcgtttctattggaaacctggacccctttcttaggcacaggtgaatcctggtcttaggagcacgcttctggtagtagaaattctgcagtcacagacaggccgtagcaaaggtccagctcacttacatactaaagctgtgaaagaaaagctagattaaagcatttctcccattgtatgtttttaataccaatttccaaaacaaatttgaagacataagctaaagaaacattccccatgttgtattagcatcctgaggctcctgtaacaaatgaccacagaattaatggctgaaaacaacacacgtttattctctcaccgttctggaggtcaggagtctaaaatgcatgttaaggggctaaaacccaggtgcaggcagggccagttccatctggaggcaccaggggagaacccacttcccgccttttccagtgtctagaggccgcccgcattccttggctcggtcccaggggagaacccgtttctgccttcccttctccagcatctagaggccacctgcatcccttgacttgggccgcatcactccagcctctgtctctggtctcctcactttcctctgctgtaaccaacagtccctctgcctcgctgttctgaggacccatggaatgacatcggatcacccggatagccagggtgctcccccacctcaagatccttaactcgatcccatctgcaaagtccctttcagcatggaaggtaccacactcacaggtcccaggggttagcatgtgggtgccttggagttccatttttcagccagccacacttagaaagccactgaagaaaacctcactgagcggtcagggagcacctgtgggctccttgtctgctgcaggcatgacaccccacacctctgtcgtccacacggcagtacctctctactgccacagggcaggggatgcaggcgcagcctggggagagccagcagccccggtggggagcaggctctaggctccgcagtctgtactggagctgggcttcacccaggcgggcccctcctggtgctctctggtgcccagatcgagagggccaccccatccttgccagccacttctccccctccatatttaactgagactacagttagccactgtcccctcccttctcacccagtgtgacttttgcattagaaaagcagaggttgacaggagcctgctggagaggccacaggcaggatctggtgaggccacccctgtccccaagcactgccacatcccctctccctggaatgtgaccagttctaccctgaggccaggccaggcacctggagggctggtttggtttctaagtgtgcagagggctcagtgcctgggctgggtgagggggagccagggaagaattagttcttggtggtgctttcacaggggttcttagaaagtatggactctggccaggtgcagtagctcacacctggaatcccagtgctttgagaggctgacgtcagaggattgcttgagcccaggagttcaagaccagcctcaggaacatagtgagactctgtctctgtaaaaattagctgggcgtggtgttgtacatctgtagtctcagctactcaggaggctgaggcgggaggatagcgtgagcctgggaagtcaaggctgcagtgagctgtgatggagccactgcacttcagcctgggtgacagagtgagaccctagtcacccttcagcagggcagagcagcttctaaaattctgggagccagcctggctgtgaaccccgaggagggtcaggaaggttgtgggatgtgtcagatgcctgcagctgcgtggaaacaccttgagtcccctgtggcctctggctcagggccctgccctcccctctggaaggcagctgggggcaggatggggcactaatggggaaagcctacccgaccccccttgtgttcctaggtgcccctcccagactctttttggggcaggcgatgtgttccatcgttgggacggtggaaggggtgtgcgagtaatatggaaaatgaatagctgtgctccaaatgggctcaccgggagagttgtggagcctatggagagagcattaatgtgctggcgccttattggtgctaatcacttaaaatgtgcgcctttgttagagctttaatgagagccacttaaactgtgcattaaaaagaggaactgcggagaggccgccggcaggccgggcggcaggcagtcatcattctcgttgaaatgcttttagtgtggagaaaagttgctggattcggcaaacccctgtactttgcaaaacctcaccgtggtgtctgcgtggctgggtgtcagcagaagcaccgtggccccgctctcccgcctccccgtgcgcctgggcctccgtgtgctggtgctctcgcacacagctgtgccgccttccaccaatgacccaatgggtgtgtgtcccgtcctggaggcgcttgaggtctgtgcaggcttctagaagggccctcgggctggccgaggctgttggtcagtcctggcaggaggtggacgcctgtgggcttcctgtctgctgcaggcgtgacaccccacacctctgtcgtccacatggcagtacctctctaccgtcacagggcaggggacgcaggcgcagccgggagagagccggcagccctgttggggagcaggtcctagtctccgcagtctgtgctggagccgggcttcacccgggagtgcccctcctggtccacatctgacccccgtcctcctgcctcctgggccggcctcctgcccgttgccacttgcagagtgggtggtggagcaggaagtgcccgagatgaggcggtaagtcccctccctgaactgctcttcctggcttgggcccgtctggctcccctggtgttggttccgggggcccggctgcttcagggaagtccctttggcacagggattgtgttgcacactgaggggcgtgggcctcagcagctgctgccgggaagccggggcatccttaccttacccgccaaatgcacgggtcttcaccttgtgatttggaaacattcctgaactgtgctaattaggaagcttggtttattttttatttttatttttatttttgtagagatggggtcttgtgatgttggccaggctggtctccaactcttggcctcaagagatccatctacctgcctcggcctcccaaagtgctgagattccctgtgtgagccaccgcgcccagcctggctgtgaggtttgtgaaggcgccaagctgctggtgtgagtgcctgtttcccaggcgctgctttaagtcagctgcagagcgcactcctagacagacagccccacacacatgtacgcagcccaccatgctgagcacggcccaacaggaagaggttgtgagctctgaccacagctcggggtcaggcccactctgccacttcctggtggtgctggggccgagggtgagtcagttggtggcccgggcctcgatttcctcacctgtgcagtgacagtgaggacacccgctgtgctgtgtgggggggcaggtgcacagtctcattcatggccttgaaagcaggtgcccaagggggaggcagcactgctaactcctcaccgtccctggctggtctggttctagaacatcagctccgagaggagagcggccacactgcgtcctttccccagggtcgtgctctctcgttgactgagtgacgagagcggccacactgcgtcctttccccagggtcgtgctctctcgttgaccgagtgacgagagcggccacactgcatcctttccccagggtcgtgctctctcgttgaccgagtgacgagagcggccacactgcgtcctttccccagggtcgtgctctctcgttgaccgagtgacgagagcggccacactgcatcctttccccagggtcgtgctctctcgttgactgagtgacgagagcggccacactgcatcctttccccagggtcgtgctctctcgttgactgagtgacgagagcggccacactgcatcctttccccagggtcgtgctctctcgttgactgagtgacgagagcggccacactgcgtcctttccccagggtcgtgctctctcgttgactgagtgacgagagcggccacactgcatcctttccccagggtcgtgctctctcgttgaccgagtgatgagagcggccacactgcgtcctttccccagggttgtgctctctcgttgaccgagtgacgagagcggccacactgcatcctttccccagggtcgtgctctctcgttgaatgagtgatgagagcggccacactgcgtcctttccccagggttgtgctctctcgttgaccgagtgacgagggcggccaccctgtgtcctttccccagggtcgtgttgtctcgttgaccgagtgacgagagcggccacgctgcgtcctttccccagggtcatgttgtctcgttgaccgagtgacgagagcggccacaccgtgtcctctccccaggatcgtgctctctcattgaccgagcgactgtgtgggctgtggtctggtggattttgtctggggaggtcggaggagaagtctctgcatagccgtgccctgtgagggacccaagtgtatgccatgggtgggcaccttgtcacacaagtaaccctggtccttcccctggtgaggaggcccttggctgcccctgctgctgggcagagacgagaccaggcatctgctcacatggtcactgcgcagaggccagagggtgtcaccactgtctgccacctgcagagctcacagcagggcactatggggcggctcctgcgcatctccttccccccgacctgcaggcactggggccctgagaaccaagggcagatctgggccgtgctctgtgctcccacacgcccgctctccatgggaggaaagagccagcctgcccagagggcagcatcctcgctgaccccggccggctgtggcccaggagactgacgtctgtcttttcggccctaggcttcttccccgggagctcgcagggctgcgacgccttcctgcggcataagatgaccctcatctcgcccatcatcctgaagaagtacgggatccccttcagccgggtgcgtacgggtggggcctgcacgcctgtgggtgaagtgggtaccgggtccaagcccaggtggccgcacataccccaggagataagctgtttaaccctggagaagtttctagaacagtgattagcatgccagaggagggccgcatggctcagcagttagcctccagctcttccacggggaagcgaagatggcagagcttgaatctggcggggtgttaacctcccctcccaaaccaaaccaaaacttcctcctgggtgtggccatcagaggcccctccgcaggggctgcaggggtggaagggcaggggcaggccctgctgacctggcaggaagctgccaaagaaacagagggcagggcccctcgtcccgtgcaaggtgggaacctggttcctaccgccccaggccacaccctaagtctcaggcacccccacggcccatgtcacccggccgtggagagaactgcctgtttagaagtgacatttcgggctctcctgcaccgtgaagactgtgaactcattcagttcactgcttcaggggctgctggtggaggctgtgatggaggagacctgaggccggggggtggggcctccctacacctgatttgatggacagctggggtttggtgtcccaggagcagagcaggctgtgctcagggtccagctcagcaactgcacccactcgaggcagttccttccccatggagaagcctttgtccatgggagagtctaggcctgtgtccccagctctgtccaggtgagaggcacgtgccaagaacctgcaaggcaggtctgggccgcagcccagctcatgaggttccacgggaagagtgatgtgcaggctcgggagcgtgctctgtggtgaggccctgagtgtcagccagccggaaattgcttgtgacatttcaatcaaaccgccaaagcatcagctcacacatcggggatccgctcttcctggcggggctgcaacccagaggccgcctcccagccgctgcaggcattcatcagacagcacagatctcgctcggagaagtgcgcatttccggcctttcctcttctcccccgtcttctggttggaacatcattcagtaccagcaaaaccagacagatcacggcattgctcagggaagtgagaagtactgattttctggctggtttgtctaaaaccttctccaaagtggtgcttcctggaggggggtgcccatcgaaggggtgggcaggcagtgagtggcctggactcccaggtcagcatctgtatcgcactgcagtttatctgtaaagttcctgaacctgagccaaaggtggctcaccaccagcctcagagcggctgctggcaccatgcatggtagcaggcggggtccaggcagtacggctgcgctccccaacaccgccagctggttgctggggccgggcgccagtttctccagaggctgccacagtgaaggcccctgtcccactgcagcgaacagcaccctgtgccgcccggcctggggaccgtccttcagcctctcagacgccatgggcttgagatgaacgtcccttccagacagcagcgtgggtcccctcatctgaattcctggcagccttcaaacaagtgactccccacactccccttataaatctttgtaatggtatttacttctaggagaaaaagccgatcaatagcagagctttttaataattaaaagtgtgtacttctgtaatctgccattgactccctcatttattctgcaagagctcgcagaggaaaccgagttccgggctttctccgtgcctggtgtctggggccgcgtcctgtcaccactgatgactttgccgcaaagcctattcatcatcccaacgccttctaattgattgttggataatgttgacagcagtgacacaggggacagacaccgtgagtgtggaacgaagccaccaggatgcaggttttctcgcaggaacataatcttcttgtcctaaccgagcacattttctcttctaggccttggttcataggagggctgggggagtgaggtccttacactgtgagagcttggctctctgctgccatcacccccattcaatcttggcattccgggggcccagctggatccctgaaggctctgagtctgatgtctgcctgacgcatgcctgcaggcctggttctccaggggagagacagggagccgtcacttggccttagagcaggtggtcagggaaaagcctttccgaagccggctcaaataggataaaggaatcagtaatggcatttactttactttcttaacttttctttttttctagagatggggtctcactctgttgtccaggctggtctcaagctcctgggcataagtgtttctcttgtcttggcctcccaaaatgctgggattacaggtgtgagcaccatgcccggcccagtaattaggtttttttttaaaaagccccaaaccttaattttatttgcccctcatttcacggagctcccagcgtagtggggagaagctggcccagagaaccccacgtcctgcacagtgagggccagcccttggggaccccatgtcctgcacggcgggggccaggccctggggccacgtgtgttccccccccacccctattttctgccgcgtgctcgttctgctgcacgtggctgtcacttgaatgggaatttaaaaatataacttaatgcacactgacttcccttgattggtgcaattaattatttgaaaagaaaaatatcacagtgttcttaaggactggcatttttccaagctgtgtcagttttgattgatgtctgacgccgtggctggcttctgaaagcctcaccagttctgatggcttattggcgacttcagtgtatccagcaatctctgctcatctttctgggggaatatataatgatcagcaggcctgagaactcctacaaatcagagataagaaaacaaatggcccgatgaattcggcgtgaggggcttgagcagacgcgttacgaaggagctgcaggaacgaaagccatggttcagtgcccagcatcggtagaagtcagaggcagccagctgggagacaccgccagccccaggacggccacgtcagaacaccgccaccagatgccagtgaggagggcgcagctgcacgctgctcccagccggggtggatgcagggcggtgccatggccatggaaaaccgttcggcattttcttggaaacggaagcatgtaccctgtgccccagcgatgccactctgtgcatatttactcaggagaaatgaaaacatatgtctccagaaagattggtacataagtgttcttagcagttttcttcacgagagccccaaactggaaacagcccgcacgtccatcaacaggaggatagataaataaataaccatagatccacgcgcaaccgagtactgtttagaaatgaaaaggagcggtcgcctggtgcacaggacagtgggaacaaatctcagaaacgcacgccaggtggaagacaacaggcacgtgtccctgccgtacaacgccattcatgtgaaccactaggagggaacgaggtctgtggtgactgagagcgcgtgcgtggttcggtggggatggcctggtagagggctggtaggaggggtgcctgggggcccggcatgttttgttcctgtctggatcagtggttacgcccagaactccgagcagcctgtgatccctgcgttttactggatgttaaataaagatgaggagcccacttgacttcaaggattctagttcatgagcctcagtttccacgtctgtggattgggcccacagccccacctcctagaagcccttggcctgagccccggggtgcagcaggtgggagccatcactccaaatttgttgttgatctttctggatggtcgtctttcaaaggctttatcaacgggcttagcagtgagcagggagtgggggtcagtgtggccatctcgagtgtccccagagtggggagggttcctagggcacaaggctgtagccccccagccctggtaggcagccctgccttttcttccagaccttggggtggctgttgggaaaccttgggtctggggtcattgtgggccccaccccagccacgcacgcctcggctcctcagtttagggggtcctgcttcagagacctgcaaagtcgaatgggccgaacatccgaattggacctgggtctggaagcattggcccgctctccagggtgctgatctgtggtgtcaggtcatgcccccggtgtgcagatatttctggatctccatgacttcatggagatccccttgttgagatacaattgaaagatggcttgggatggcggcgtgtcgcaggccccttcctggcgtgttttgcgcgtgcagtggtggttcctttctcatgcgagggcagaaggtgtcctgagcgcgtgcagtgtcttgtcttcagagcactctaaagctgctgtcagcaccacccgccccgaaaccagccccagctgcttcaggacatgtcacagtgactgtgagtgtgactcagccacctccaaagcaggaggcccccatcgctccccatgaaggtccggctggagacacccccacgggcattgtgtccagccacggctccatctgcggttctcccactggggtgatgctgacggccgccttggggcagggcaggggctgctggggctggaggggcccggctgagccgagtggaggttgcagagctgtggctgcggctgctcactatgtccttcatgagccgcgtgggaaatgggctggagccctggagcccctggagccgctggatcacctttgactttgtgaaacccccttggctcataagccaggctccctggcacttgctgggaagtgcccacgtcccatcccctggtgcgcctctggtggccctgccctcacctgtctcctttccctctgcagatcacgcaggaggccggggaattcatgatcacatttccctacggctaccacgccggcttcaatcacgggttcaactgcgcagaatctaccaacttcgccaccctgcggtggattgactacggcaaagtggccactcaggtaaaagcttgcctgctgggaacgggtcccagcagggcgggaggaggctcttttttgcctctgcagccacacgcccatagctggtccagcagccgtttcgctcagcccagggcctgggctctcaaccagggtctgattctgggctcctcagagagcttttgcccagaacgctccttacctcgaagactggagaggaggtgggcaggtcgggtggacgatggtggcccagggcccatctccagcgagttccatacaccagttatccctcggcctgcgtgggcctcctgggcatggccggctgctcgggtctaggggttggggtgtttcctccaccagcaccattgtcccccctgctggctggctcctgggcatctcctggccatcatggtcctggggttgggttgtttgctgacatctctctcctgggggccgcttggccaggcaggagcccactcaggcatctgcccccctccctccctgctcccctgtcagtggcagtcccccagctcccagtgcctgggtgcttcctgctggtggggtccctggaggtcacggtgagcttagcatgcccgtgggaagactcacagtgagtggcccttgcttgatttttttctggtgattctcgttcctggtctcagaaggccgattattggccagcaattggcgtctgaactgagcgcttgttccccactctcctaacgccacgtacagccatctgtgtggctgttctcgaccatgcggagggtgtgggaggctactggatggataggaagcccacaagagctgctgctgggcacgggtgggacggggtcgccttggctggccaccccctcccccatggtctctgccttggggtcccagtgacggggacgtggacggggcttatgaatcctaagcctcagaaaggggagtgtgggacccgggaagggaagcagctaggaggccgtctgggcatcacaggtctagccctttcctggctgcctgtctggagctgggggctggggagcctcctcccagggctgtccctgaagtcccctgcgtgcttttcctggctgcccccaagtaggactgagctgtcccggcaggccaggctcggccacgtggccctggctcagggctgctgtttctgggcagcattgaacagcccagctcctcccagcccctctgtcttccccgcagagacagcctcagcctcagcccctcccggcgtctccctctggtttggggtcatgtggctgctcgtgatgcagcaggacgggcagcgggctggccagggtgagagcaggtacttcctcccatcgtccctcccagtgcagagccttccagttcctccagagccggggtcagcacaaatggcagattcttctcagatccagatgtgggggaggtgtgataggagagaccacagggccagatccggattctttgactctcgcagcattttctagatgtcagaccttggcctggtgcggtggcttatgcctgtaatcctagcactttgggaggcagaggtgggcggatcatttgaggtcaggagtttgagaccagcctggccaacatggtgaaaccctgtctctactaaaaacacaaaaattatccaggcatggtggtgggcacctataatcccagctacttgggagactgaggcaggagaatcacttgaacccgggaggtggaggttgcagtgagctgagattgtgccctggtactccagcctgggcaacaagagcgaaactgtctcaaaaaaaaatacgtatttatatattatatatgtaatttatatgttatatataatttatatattatgtataatttatatattgtatataatttatatattgtatgtaatttatatattgtatataatttatatattgtatatttatataaaataaattatataaattacataatttatatatataaatataaattatatatgttataataatttatatattatatataaatataaattatatatgttataatttatatattatatataaatataaattatatatgttatttatatattatatataatatataaattatataaattatatgtattatatataaatataaattatataaattatatatataacataatttatatatataaattatatatgtatgtataattaagatggattttggccggacatgatggcttcacgcctataatctcagccctttgggaggctgaggcgggaggatctcttgagcccaggaggtcaaggcatccctgagctatgattgcaccactgcactcgagcctgggcaacagagtgaggacccgtctcaaagaaaaaaaatgaatttcacctgtttcattttacccaccctcccccgcccgccgccccggcccacccttttatagagacagggtcttaatatgttggccaggctggtctggaactcctgggctcaagtgatccacccacctcggcctcgaaaagtgctgggattacaggcgcgagccaccacagcacaccacctctttttgcttttttctcctggctactgggaaaatggaggcagcataggtggcctgtgtgacatctctcctggccacgccggtctggacgaatgagctaacctttatttttctggctgtttctctgccttcaatccagtttagaaaaagaacaggggtctacagcagggaaggcttgagagatgcccccaggactcagttcagaaagtctcgaatgtctctagtgaagactctgggcttagctaaaggaagagagatccagaagttgggatttcagctttttgatctaaaggagtagttaagtatctcagggctgttgctgtgttgaaagggcatgtgtctgtgtgtttgtgctgccgtgaggacaccacgggtgttgtgaccagcccagcagcagattgagctgtaagccccaggcctcgggcttgtcctggaggtgctgtcggagctgaaactgcagcggggcggtggggactgcccagatattaaaagcaatttggggttcagccatgtgttcacaaacaagttggcatttgggaagtgcagacttagattgggctccacgcttccattgtcaggcggcgtagcaagtggcgtgcagcgctcgaaacacaccaggggttccaggcaggcgcccagggcctgggcttcctcctggaccccccagccccgctgtcccagcccctgctcaggcacccctggtgtagtcaggcctggcctgggcggcgagggccttacgcagggagtgtcattagccacaaggcctctgtggccgtcgggggggtcggtggctctcaggcttcttggcggggcagccggcccctgactctggcagggttttctctcccataagcagcccaggctggagagtctgttagagcatctcgccgcacagatgacagaggagtgttagaaggcagggaaacggcccaggtcaggtggggctcgggccttgttcagatcttgtgtgcagccagattggagagaaggggcagcccagaaccccccttttctggtgtccctctggccggcccagctcccctgtcccatttgcgtttcgggccactttgttttgagcacattcttcagaagagagccaaagaggaggctttccaccccctcgatttgcttagagacatttttgcttgttggctgttcaccttccttgaccgctagggacccctgcccccccccaccccgttgtcccctttctgtcatttttgtgctcaggagctgacaggtgaaaagccaccctcctgccctggccgggccctgtgaattttgggtgtctgtgttcacgggttggcaagctagggctcggatctggtaggccgacgctgtgccgtctgcaaactgagcagggggtttacgtcttcacagggttgtgggaggagggcaattaaaaggatgtgtgacctgtgacagccggacgaaactgaaatctcacccacaaatgagcagcctgtgcacagagccacactctggcatggaggtggcgtctgcgtctgcttcgccccgcggagttgagtagttccgaaaagccaagaggcgtgtgctgcctggcccttgcaggggaagcctgtctccccgtctacagatgccagcggggttgcacagctcgcaggacagccacctcctcccccccccagcccccagggcctctgtgggcagaggggctgctccgaaagcaggttggcccccaccgcctcaccacacctcgagccagtgcagctccctctggagttccggatgggcctgcagcagctacagccgtgagcaggccagaccactgccacagatgtgctgccacctgcctgcggagcatccctggctgccccatggcaggcaggaggcccagccctcagcccaggtctgcccccacagggcagagctctccaaggttcccccggctgtaaaatcccagagaaatacgatctccctgcagcaggtggcttacctacttacacagccttggaccagagcctccgggtggagcttccagggccctgcgcgcacacacaggaggcagcctggggctctcccctcccgtcttctgcagagcagggctggcgcctgcctgagctcacaggtgggatggagcagcccaggccggcacttgtggcctaaacacggcctcattcactccccatcagcagaatgccgtgggcacacggaggccattgtcaaggagggggtgggatttattcccgtgggtgtctttcctttctagctggtctgtgggcattcacccttgccacctgtctgtgcagccagtgacatagtcattgcccctcggggcaggaggaggcctggtggccctgtgtgtctgtgtgggggaggtacggctgtgtccccacccccggctctccactcctgctcatcccctatgaaacctggtgtcatggacctgctcccctcggggctggtgacctttggaccccagtggtgacaaccacagaggtccccagacatcacctgcagcgtcccttggaggcaggattggccccagtgagagctgctgcccagggccacttccgaggtcagtcatctctttctggggggtggggtaggtagtgccagtgtcatttttgactcccctgctggtgtggccttctaggcccaggtttcccagcatctcccctctcctgctgagggcccccatctctgagtattccatttgagctgctcatctctgtgccactttttcccaacttaaggcggctgagctctgcagcggtctgcagcctcggtgtgcgacgtttcttaagcacacaggtgttaagtatctcagagccatgaaactctctgccttgcctgacagactcccaccttgaggatggaccctggctttggggctgggatttcattcactgcactcgagtctctggacgggggctgggctgttcggagggtttggggagtgagggcaccgggcagcacaggtttaagtctcctgtgtaggaatctcacgtctttcgggagctaaatgccaggcaggaggttgctttcccctcagaaactagaagttcttatccaacctgctcttcacgcccacctgtggggagagaagcccattccttgtgttcactgcctgccggagagcaggagggagcctgtttcctcgtgggcgggatgtgccccccgactcgggtaggcccgagcatctgagggcccccaagggcccatcgttttcagggtgaccgtccacacctgcaggggcagggagtcggcggcttagcttcctctggagcacggttccatcagccagatgcgctcacatccagctcttagcggctcctgcaaaaactcgctctgatcaaagggaggtgagtgtaaaaatgcggcccgggctttgtctccaactccccccgtgattcctggaccacgcaggccatatcactcggacaccacggatacaaaccctcactcccctggcccctagagctgagcagagcgctgggttcgacttccatctagagcagaggtcgatgggggggaggttgcccctgcccacagctccacccgtgataagtaggcaggcttttccataattaatcaaaacctaggccgttcatctgtgggccagggctgagcagagaccaccggagtccctgagggggcccctgaggctgcaggggacaggccaggccccccccctccccccccccgcaaaagagcaggttgtggttataggggcaggatgacagtgggagattttgacatcctcaagaggcagaggagcaggacgcccctgccagcttcatccgcacatcccttggggcagatacagaaggaagaatgtgcattgttggaaactggggaatacggtaaacaaagagaagtgggagctgaccttaccatctctgccatccgctcagccatgagaaggagcaaggcccagcgtgggtgaaccctgaggacaccccgctcagtgagagaagccagacccagaggctacaccgtgcgagaccccatttctatgaaatgtccgggacaagccagtgctcagaggcaggaagggatgcttgggtgtgggggctggagggtgacaacggatggggacgggttttctttggaggatgaaaatgctctacctttgatggcgaagatggtctccccactctgtgaatacacaagctcctgcgtcgcacacctggtgaattgtagggcacacgaatctcactgaaactgtccagaaacatccttcccccagatcagctctcagcaaatcaggaacagtaatccagaataaaaactgggcagcctttctggaaggccgtctgccatgggttacacatgtgtctcctgtggcctagcggttctgtctctggaacacgtgcataccggttccatgtctagggatatctgtagccccgtttgttgtagtggaaagttctatgaccaggggatgggttgaaccagtggaatgttatgcagctgtgaaaatgggtttgctccatgaggtttgctctgtatctttgggcatggagagatgagcgcgacaactttaagggaaaaaataggctgtggactgggactcttgtgattcccgttttttgtggggatgtggttcttgaactgggaaagggagatttgcccaagtattggttgatattagtttgatgtcatggaatttgggataccttaaaaatatgcactaacttctcaatatggttctgtctttttttgtactaaaaaaaaaaaaacccacatactcctctttccatagtcagaggggtgtagctctggggagggaagagtggggtccgccattcctaggtgcttcttgagcaagcaccccacagttcccaagtggaaaaggtttttgttgttgttgcttcgttggtttgttttcagaatgggagttaaaaaccaaacaaaaggccaagcgcagtgactcatgcctctaatcccagcatttagggaggccgaggtagggttgcatgattccagaggttcaagaccggcctgggcaacatagtgagaccccattctccacaaaaagggggaaacaagacaaaaacacaaaaactgtgaagacccccaaagcctggcccccttcctccctgctgagcaggtgaggcagtgctggaaagaggacagagtggaaggtcctggaagcccagcccagcattgctgagcgcctgccgtgtgcaggggaggggtcctagcccctgggtctgccagggagaggtgagagtgcagaggacagcaggcttgcctccctagccacacacctcgctgcatgccctggcctcgccaggctgaggcttagggtgcagtacccggttcgttttgagaagtctctttctcagctagagctgtctcagtggtaacgttctctctctctctctcctcatctctctctccccccatatctctccccctctctctctctctccccctctccccctctgtctctctctcccccatctctcttccccctctctctccgcctctttctctccccccctctctttctctccccctctcgccccctctctctccctctccccctctttccccgctccccctctctctctccccttctctttcccccttgctctctccccctctcccccctccctctctttctctctctctctctgtctccccgctgcgcgcgtgcgcccccctccggcccccccttccccccaccgccgacagtaccaccctccatcaagtgccgactctgggccttgtcaccttgggaggaccagagtagtgcagtgactttgccaaggtcacacagcaggaggctgggcccagcacaccctagaccttcctctgcttcccttgccccacttggaggcacaggccgatggggcatctgggagcccacaccctccctgcccaccaggtgtctcctgggccagtggcttcgtgtcctgggcacgtgtcctgtgcacagcccggtgggggcagctggaggggtctccaaggcggcggcttcctgtctcagagcaggatcccccggcatgtgctccagcaggcaggctttgtagtgggattactaatggggcagatcaaaaggatgttcctatttcactcaaggaaataaaatgtgcacgcagccgcctttctcacgctgaactcaagttagtcctacaagcctgcacgccatgttagattagctcagcacgcggccgggctggccccgaggtgggtggtgcctggtgctggtagataagggtctctcctccagagcccaggactcagcggcatcccgaaacaccctgccacggggagagttgactgaggattaaacagagcgcgagagatgtgaagcctggctggaaggctggggagccactcacgctctcttaactggttccctgccagctgtctgtgggtgaggcctgctgtgtgccagcctccccggggacatctcgggctctctggaggtgtctggcagggagagcttctgctgagcttgggaaggggacgatgacttggattccccagaggcgccattccaggaaacggcccactcggcaccacccatctcctcccacctccccgcatccaggctggatgggggctccggcaggaaccaggcctctcctaaaaccccagccctggggtgtactgaacttaattactgtaaaattcaaaccaaattgtttctgctgcctgggagaactgtgtgttccttctgtttggtaatgaggctgcctgctccaggtgattaacccggagcccagggggagggagcccagggggaggcggcagaaggcaggggctggggaagggtgggagggaggagggcccacggaggtgcgggaaactccagccactcctctgacccgctggagcccacggctggcctgtgccctgcctttggcttcctgcctcagtgagcctctgatttatggcgttgtggggctggacgcatcgtgtgtgccgcaaactgctgtgtgaaatatgtctcccttgctcttcccagatcttccctgtcactctgaccctggtgaggcctttggggccccttcccatgtgtgggcttagggggtgtcacagtcacgcagaagcgtggggagaatctgcagctaagaccaggcggagcggatcccgggccgggccagaatgagtgggtcccatgctggctcttggcctagtgtttatgctgcatgtctggagggtgatctaggagaggagtggtctggaaagaaggcctcgtttagtctctccctcggcactgcggacattggggccgtatccttctctgggctggggccgtcctgggcactgcacggtgctgagcagtgcccctggcctccacccactccatgccaggcacaccccaacccagctgtttcaaccacaacatcggcaggcacatccactcccatgggggcagggccacccattgaagacacctgggtctccaggctccctgcgggcccttccttcctttctcccactgctctcggctttcgggatcacgccctctaatacccccggttctgctgcccaggagctccgggggggacacatctccccagaggagggtcgggggcttttctagaccgaggctcgtggtgtggctcgagggcctttgccagctcggcagcccccagtcttctctaccatccttcatggacagagctggttcgggggctgcagctggttgctgcctggcatcagaggagcgggtctgcttacggggtcaggcagaggcaggaccccctcgaggggcactggcgagggagcccaggggtcagccgtcagagaagcaggagagtcagaggagggggctcgcagggcctggccctgagtcagaaatggtggagttctcccctctgccatctcagggcatcccggctcatggctgttcctcagccgtcgtggatgagtcgtaacctggagagtgagagagaacctccaggggcaactgctggcaaggagggatcaggggaggccgggcccctgtacccctgaccacatgtcctctccccacccaaggtgtgacccttcatggggcctgtggttcatacctggagctgtctgcctgggtgcagaccctcccctcctagtgctctgcctcagtttccctcctagggctgttggaagtgacatggaacagcacttgggtggtgcctggcacagaagcaggactgctgtggctgttgaggccccttcagggcagcatgtggaggagaaaggcaggtcctggtggcctggggtcaggtgtgcagctgcctgcttgtcatgtccctgcaggggctcacaacactgatagactcgaggctactttcatttagggagggccaaaggggacatcggagcctccccaggcacctggtggatgtgtgggcagcatggaaggctgcggaaggccatggaaggcccgtgaccttgcctggcctggctggccgggaggggcagggagccgctttctgtgctgccaggaatggccccgcagccgaagcccagggagccctgggagccggcgcctaattgttttgttgacgcggctgccgagcacttccagtaggtttcctaatgaactggtttgttatcggcctcactgcagcgctgataattacatcagaaacagggggcccactcgtccttcccacgcgttctgtgagccatcagcgcagatgcgggcgcctctgccccttcctcggtgtttaacgctttgtgtgccaaggcacctgccacccacacccaccccagacagatggtcgagatggctgtgagaggagtgtgaccgccactcgccccggttggtgtctgcttggcagtggtcaccgcgcaggtcactgttcagctgctgggaaggcagtggatgaggccatcgaggtccagggaggagacaggacacgaacaagggtggaaggaggaatttctgctcctagagagggtgcagggacgctgcagctgcggcctggtgtgtctgccacctgggtagcccagtccacagcccaggcagctgaaagcaccagacatgtatcctctctcagttctggaggcagaggctgagatgggtgtgtggcgggccgagccccctcagggcgccagggagaccaccctgcctctcctggcttcagggctggccgagatctcagggctgcttggcttgcaggggtgtcgccctctcctctgccccatggtcacgcggcccctcctccctgtctttgtgtcctcttgtctgcttctaagggcaccaggtgctgacccccggcaggccctgatcccatatgtgaatcatgcactgatgacagctgctaccaccctgcttcagaaaagctcctctgtgaggccccgggtgcaggatgctgagtagcgcggggaacagcactgctggggaggaacgaaaattgcgaggtccctgagcgggggacctggcagaggccaaacgtcagaggtcgggggctgcagtaagggcctttgaagttagatttcatcaccatgtgcgggggggaggcactgggcatttcagcaagggagaggggccactggctggagaagggactatgggagagatggggcagggagcccggcgtggatggccgccgtctagacgggcatggggtctgtgggcgtgggaagaaggggacagcgtgtgcctgtgttttaggggtggtgcctgtaggacctggtgataggacagaggtgggggcacaggggaggggtggggacttgggcatgtaggtgtgcggtggtgctgggagcgcacagagggacatggaggagccaggactgggtgtgctgttgagatgcgtcagagcctgccttccagtgtgggagccacgggccacacgtagcaccgtatccattaaccaaaatgaaataggatgaaccctccactcctcagtcaggccagccgcgggtcaagccctttgctaatagccgggtgggctggtggccgtgtcctgggcagcgcaggtgcaggtcatcgccgtcaccacagacagtcctgtcaccgtgcagctgatgcgtcctgtggaggggtctgcagctcgggggcggcgccgggggcggggcaggggcagtgtgagggatgggacgtgttgagccatagatgtcctgtcggcagctatgagatgctgtgccctccccacgccaggatcgctgtttctaaggcccctgcccgtccccatccctgtccacagcagggcaagcaccagccatgcaatgtctgtcaccgtcggctgtagaaccgcccgctggtggctggcattgtcctcaatgttccgccctggttcctggatcagggggctgggagttggcgctgcagctgacgagagcattcatgatccccgtggtcagatgctatttgggttgatgattttatcggaccacatataatcattttctcattaggccggtggctgtgtcttctctctgccactctactgttttacatgagcagactctagtatctgttcaggcttttaaaaaagagatggcctctggtgaaagctcagtgctgtttaaatcaggaaaggtggcagatgagccccctgggctccaaggcagcagtggtagcccactgtgtctgcaggtggccagggtcctgtgatgatgctgccagccaggctgctgcacactgagagctgggggcccacgagcctcggtgctggacgcccccacagtgtggatcagatcgcaaggggctggccagggcagggcagagcctgctaggaggagggagagggctgggagcagccagggtggacccctcaacctggatcagatcacaaggggctggccagggcagggcagagcctgctaggaggagggagagggcccggagcagccaggtcggactcctcaacctggggaccctcccccagcagctgcaggcttgagtgtgtgcagcacttatgtgcgagcatgtcgtttgtgtgtgtgtttccctgggaatcagaccctggcaggggcccccagtctatagagtgggtgctatggaccccagccgctgtgaggcagagtgtgcgccccaccaaggggcaggctgccgaaaagtcagcttcacagggagcttgttttaggaggaggtccttgtgttatggaaatgtaggccacagactgaggcgcacacagggccggtgtacagtgtggggaatctttttttttttttttttgaggtggagttttgcactgtcacccaggctggagtgcagtggtgtgatctcggctcactgcaacctctgcctcccgggctcaagcgagtctcctgcctcagcctccctgagtagctgggactacaggtgcgccaccacacctggctaatttttgtatttttagtagaggtggggtttctccatgttggccaggctggtctggaactcctgacctcaagtgatccacccgccttggcctcccagagtactgggattacaagcgtgagccaccgcgcctggccatggcgtggggaatattcacaaccctaccccatccggactcctggcagcatggagtggtgtcaccttggatggggagcacggtcccaggtctccacgggcttgggcaacccctggggttcctgctgacctcagtgcccctgcccagaccccagtttctcacttccgtgcgatgtggcatttctacactggagtcgctggtgacatcagtggcgcctgttgccgcggtgcccccggcggtgtcggtggtgcgtgttgccatggcgcctgcctggtggaggaagtgtcccgcggtgcccccggcggtgtcggtggcgcgtgttgccatggcgcctgcctggtggaggaagtgtcccgcggtgcccccggcggtgtcggtggcgcgtgttgccgtggcgcctgcctggtggaggaggtgtcccgcggtgcccccggcggtgtcggtggtgcgtgttgccgtggcgcctgcctggtggaggaagtgtccctccgtttctggatttgccttaatagctcagagaaggctgagggaaacctgtgagtgattgtaaacatcccatgctagggaagggcttgtgaggccacacagggtggcttccaccagaatcgacactttaaagagcacgggctggcagcatgtgtggtgtggagtcagcagggcggggagaaaagaacaaggcacgtgccccatggccatcgggtgatggggatggtgcctgttcacgaagaagagtcaccaagggaaggaggtgaatggtaaccaaagccaccaagatgtcaatctcaccgtacacaggattcttaaatatgtagtaaaaggctgtaaagccccacgtggcgcatcagtcggccatccaggcttcgtggttttgttttttgttttgtttcttgagacagtctccaaaaactccagattggagtgcagtggtgcgatcatagctcactgcagccttgacctcctgagatcaagcaatcctcctacctcagcctcccgggtagctgggactacaggtattgcaccaccatgcccagctaattttttgtagtttttgtagagttggggtctcactatgttgtccaggctggccttgaactcctgagctcaagggatcctcctgccttggcctcccaaagcactgagatgacaggcgtgagccgccgcgcctggcctgtgcaggccttggtggagctgctccttcggtcctgatggggagcatttcccaaatgtgccccatggaaaaggcaaggcgcagagcagggaccgtaggatgtcattgacatgaaaagcagaggaccgctgccctgtgtgtcgggaggctggggcctcagggcagagagcgcgttggccaccttcccttttgttcttctggagctgggtactgggtgcagtgttggctgttccagaaagtctatgagttctgtctccgttttggcttggagttctcctgtgggaggtgcccagcaaggatgattcccctcggccaccagtgagatgggaaccctcctcctcctcagctcagcagagccgtcgtggacctggggcccccagcttctttggatctcaggcatggggggcgcaaatgtcagtcgggagctgtcaagctctgtggaaggtttctgcatgtttgcccgagccccaccaggaggggcttcaaaagtgcttgtccaagtgcagagcaaggcagggcacagaggcagaggcagacacagcccccagctgggccagggctggtggccaaggggcttcctcagtgtgtagcctccgtggcagcctccatgtgtagtacatggtcagtagaagccccattaacagcaggggggactcggcctctggggagcggatttcttttgcaatatgatgttaaaggaaggtctggcattcagtatgttttttattttattttttattacagtttacaaaagcactccagtttcattggatttcaggcattttgcatgggatcgttatggctcagaaggcgtaatctcaggcattagattagagtgacaggcttgggaattcagaccggagaacagctgccctgcctgttcccttgtaggtgactggcaggtcttgctttataacaggaagtgctcccatggtggccctgacttgcccagcctgtggggtttgcttgtgttacctcatttaaaacccctggcagcacgaggttggtccatctagttccctagaaaggtgccatggactgaaggtctgtgtcccctcagagtcatctgttgagtgctcatacccctccctagggtgatggtattaagagatggggcctctgggaggcgacgagggcatgagggtgatgccctcattgatgggatcagtgcccttatgaaagagcccccagagagctccctcgccccctccatcatgggaggactcagtgagaagatgccaagaatcaggaagtcaccctcaccagacaccagacctgccagtgccctgatcttggacttcccagcctccagaaccataagaaataagcaatttgcttatgagcccccagcttatggtattttgtttcaataatggactaagacaaaaggttcattccagtcacttcctcacatgccatttccctcatccctgcctccaaggaatgtgcagggtggatttctgagcctttagttgctgctttctttccttttggcagagatactttcaggggaacctggtcacatagaacaacctccggttccagtagtgctgggcacacactgggtagcagtgggcagtggagaggattgcagggcaccagaaggcccatttgtttcctttctctttaaacatgatgagcaggtctgtgcaaataccccaaagtccaaggatgctgagaggccaaagaaagaagctggcattcagtttctcagagagaaacatttaataaggatttacaacgagaagccatgtctgtgtcttgggtggcggtagtgagacaagacggtggatccctgcaccatcacccccagacccagggcttatataccatagggaagggttgttttgggatgtgcaagacaattgaaatatggaaacctcaagggccatttgaccaaagggcaagatttacagtaagtacctgctcttatacaaggagcagtagatgaactggaaatctcagaggccttcccagaatgggggttaatcaaaagccaacatggcaggttagcatccaagatggagttgctttggcctccacacctgctgtgacctcatttctgagagacatatgctccaggggcttcttgagaaaggaacacaggcagtaaagttttgagacttttctcatttgaaaacagggcctgagggtggcaccctcatggaggagatcagagcccttataaaagagcccccagagagctccctcaccccttctaccagaggaggacacagtgagaaggcaccatctaagaaccaggaagtgaccctcaccagacaccaaatctgccagtgctttgatcttggactttccagcctccagaaccttgagaaataaggaaagggcagaatttgaaaatgaaaccaaaaactccacaggatggttaggcaacaaagtagaagaacttgtgcaggagaagctgctgtctgggtggcggatagtttggctgggtatcgaagtcccttcgaaggctgcacccatccgtggttctcattcagtgctgctggcacaaagatgctcctctgattcctcatccttggtgtgggacctgtttttctcccttctggaggcttattgaaccctttttgtgtcccaagtgtcctgaagtcccctcattgggtacctgatacgtgtctgatttttgtcacttgcccctccttgggcctttccatccatcttttccaacctttcccatgattctggtaaactttcttgaatggtttcattgattatttgctctcctgtctttcttgtttctatttcaaactcccatcactcgctattgggctttcagaactagtgttccactttatcttccccacctccgttttctacgttgtcttttttgtttttgttgttgttgttgttgttgttgtcttcaagacaggatctcactctgaaatgagacagagtctcagcctagagtgcagtggtgcagtcatagctcactgcagcctcaaactcctaggctcaagtgatcctcctgcctcagcctcctgtgtagctcggactacaggtgtgtgccaccacactggctaattttttgtagagatggggtctcgccatgttgcccaggctagtcttgaactgacctcaagtgatcctctcgcctcggcctctcaaagtgctgggattaaggcgtgagccaccacacttggcctctttgtcttttttattaatttgttttctggaagagttcctcagcttcctcacttaacctgtctattgatgtgtttttattggtgtttttcatttctgcccttttttgtcttctgaatattccttttgttataagccccgttcttctttcatgatgtagtatcttttatttctgaggatattgattgacgataggtttaaattctttttgaaaatgtcttctctggctggacacggtggctcacacctgtgattccagcactttgggaggctgaggcgggcggatcacctgaggtcaggagttcaagaccagcctggccaacatggtgaaaccctgtcactactaaaaatacaaaaaattagctgggcatggcggtgggtgcctgtaatcccagctactggggaggctgaggtaggagaatcacttgaacccaggaggcagaagttgcagtgaaccgaggttgtgccattgcgctccaacctgggcaacaagagcaagactccgtctcaaaaaaaaaaaaaaaaaaatcttctctgtcctctgtttcttaccaggtttttgttttttttttgatagtttattttgatctctggggatcatagtgcaggcccatctctctgatgcttgggggtaacgatctagtgtaatgattacaagtgagggactaggtgcagtggctcatgcctgtagtgcagcactttgggaggctgaggcaggaggattgcttgagcccaggacttcggggtcggcagtgagctgctgtgatcacgccaccacattccagctccagcctgagcaatagagtaagactgtctgaaaaaaaaaaacaaaaccccaaaacccaaaaaacccaagtgggcaatggatgctggtgatgggttgggatgcaaggggatagcggggagggcctcactcggtgctttacccggggaggtctgggtgggctgtggatgcaggggaagggcggggagggcctcacttgttgcttttcctggggagatccgggtgggctgtggatgcaggggaagggcggggagggcctcactcggtgcttttcccggggatacctgggtgggctgttatgggggagcccacatcaggccctttgggtctctccccttgggccagccggattgcacagggagtagccctccagcctcctgcctgggctcctaagggtgtcacccacatcctccactgtgcccagtgtccccagcccagacacccaccttctctggcctccccagtaaatgatcctagggagtccagcgaggaggggcaggcggccgccagggtgccaggaggggtcgggtgctgcggcagtcctcgcgcagacctccgttttgagcacccccacccttgtttccaggggaccctgggccatgaggcgtggggtgcgtgcccgccaccaccatccgtgtctctgctgggaatggctccctggtggccgtccgtctgctcgccacgtcccacccccagcctgctgtcgtctccttttccatcctccctgtccttgcaggtgtgtcctccctaaaggcactttctcgtggcttcaggagagagatgggtggcgtgggcttgccagcctaccaaggcatcacttagagccaggagccatgagcgtggcctccttcctgcagttgcctctggctgcccaggagggatgtggtgttgcctggcagggagtggagacagtgaggccttctaggggtcctcccttgaagggtcagcagaccaatgtggaagtcaccaaggatgaaggccagagcctgggggagggtggagctggacacccctgggaagtctgggagaggggctgagcctccacaggccaggggagcaggggaggaatggggccggggccggggtggcatctggggccactcccggtctcttgctgttggcgttgggagggatctcgcaccacagcagggaatcgaggccccggctcccctcaggctctcccttcaccggcaatgggcggcgggcgacgggtgacgggtgacgggtgatgggtgcagcacccgccccgcccataggagagccctggtccactgtggcctgtggatgccgcccctgacgtcagcatctctctctggcctccctgggagcagtctcagagcagtgaagagctcttcacgtccggtgctgtggcgatactaagtaataagatctccaggttttattgggcattaatatttattcccatgaaaaggttaaatttatttcactttaaagccctggagagtgcaaggtggagccatagtcgcctctcctggcaacggccctgcccaccacgtacccacctctcccacacaggccagtcctggtgatggcctgcaggacagggcagatgtgtggggcagttgggggcacccccttttggaaggcactgctgccagtggggccggtgagtgtgcagagcccagggccaatgtgtgcctcctgcaggcaccgggcagccctggccactcctcagctctctgaccccttcccccgctctctgcagcaggcaccacacgagccaatttcgcttggcacgacgtcctgaagcaggccctgggctctgcggctgctggctctgagcccatcgacattctgatttgtattttttcatgctttggaaaaaagaaatctatttatctctgcgtcgggtcccgctctgcataaccggaggcaaaccagcagccccgcccgctttctcattttcctgggaaggtagcagcgggtcctctgaggcctgcgtcaagaatatcgggctgtcggacgcgtcagtcttcaggggcaggtgacggccgcactgcttccagctctttggcttggtgtttgggcaccagctgacgggccagccagcagcagcggtgctgaggttagtccaggtcccctgaactcgacggccatcaatcccgggcctgtcatttgcaagcagctgcagcagctggtcgagcctcctgctagaccctctctccaccccaggtttttcttaagggtctgtgacggtatctgtcagtggagactcatgttagccatgtcaggagggcctgtgttggagaaggatggagggaacagccccgagcccagggggcctggcttttgctctgtgaggctcgctccacaccctgttcacttcctgatccccttccccaccctgccttggtccttaaggaggtgaagatggggcacgggggtgcacggccacctcctgtagaaccagggcaggccagccaccttctgagtagcttccgagctcctgaggcttggccacccgcacatcatggggtgggtgaggagcagaaggaggggccctccccacggctgcctgcagtctggccctcccctttttatctgggaaaaagtgtcctgtggctgctgggtgggtggcagggaggctggccgaatccctggccaatgagtcccgctggcaggaccccgagaagcagaggagctcgctccagctggtgcccctccaccccggcagcagcaggacgagcaggcgtgccagcacagctcctgggcacctgcccctttctgctcccgggtcccctggcttctcatatgtgcttattttgtctcccagttacactgtgagctgcttcagggcagggcccagcgttgcacggtaaaactacattaattcagactcattaattcagagcctataatagttcagacatgggagacgtgactctttttgagctaaaagttggaaaccgttttgctctgggtttttatggccacaattgcagaacctaatctaagatcagtaccttttttttttttttccagcaactaaaatcttgggaaattaaaggtccttaaaacatgctttcaattgtgagccagacagttctgaacccggcaaagagcaggcacagggatgctctgtcttggaagggggttttgtctgggaacgccacttccaggattcagacctcatgtgtgtccctcgggagcttccaaaataggactgcttttaggtggagcgtattggaactgatgtcagtgagaaaatggacaccctcacaccccccaaaaattagaaacagaagacctcactcctcaggccgtgcctcttctcttccccagaccctgggcaggtctcagcaaacccgggagaaccagagcctgactccaggtcccaaagttgtcatttcagggacctgaattgctgttttctcccatgtatgagtgtctgggctcattaagataactggggccatcccagccggaatgtgcaaagtccatgggctccgggagtttggagctgggtcaggtggtgaggccgggagagtcgcaccccctgggctccgtccgggcagcaggatccaggtccccatgaggctgaggtgcaaatggccccgctccctgagctgcccctgagttctgggggcagcgtgcccacagtacatggctggcttgggctgatggtgcagagggcacaggacccagagcggggcagagcaggaggccaggactctccatgcctggagccggactgcttcccggcaggggcagtcagaggcccggaagccggtagtggggcgcgcgcagctgccacgctcagtacaaactgggactgctgcccatgtctgcaacagacacacctgcgattgctcccagagtgtgctgaagctggtctgtgggacgtggtgttcaccccgatgctgttacactgcgagttacactagaaaagttacttcatgacttaagtcaggcttcagcaagctttttcttttgagacagggtctcagtctgtcgcccgggctggagtgctgtggcatgatcacagctcactgcagccttgaccgcctgggctcaggtgatcctcccacctcagcctcccaagtagctaagacagtaggcgtgcaccaccacactcacctaattttaaaaataaatttttgtggagacagcgtcttgctatattgcccagggtggttttgaactcctggcctcaagcgatcctcctgcctcagcctcccaaagtgctgggattacaggtgtgagccaccatttgagccagcccaaacttattgtaaaggacctgatagtgactgtttgcagctttacaggccgtgcattccccatcttgaatgttcagccctgcccttgtagcgtgaacacagctgtggatgatacataaatgaatgggcctggctatgtgccaataaaactttattcacaaaaacaagtggcaggccagatgtggcccatgggcccaccttagaggatatgccttctcaataaagagatttagagaaataagtagcgcagaagtgtttactcctacaattgaaagaaccacagttattgttttgatacatttccctgtcttgagagagctctgcccataattgggctcttgctatattcatgaccgtgcattttgtgtttcttcaggtaacagacacatcctgaggacgtttctgtcattgaaagcgtcctgtagaccgcatcttgccagcgcacacctccctgttgtgtgtcgtttatttagtctgtccacgatggttgaacggtttggttagagtcattgtgtgtgtgtgtgtgtgcgcgcgcgtgcaagcgtacttgtctttcagtacaaaagcaaaggacatctttgaattccttccttccttaggcgagatcgctagcagggggagattagggatgagcttgcctggagtgtgcaaagatccacgttgcacccgtcatctgcagcttggaagagctgctcagctcctccttgcatcctcctgaggccgccagggtctgctccatgctcactgggggccgagtaggggccgtgatgctgacgcaccctcctcctctgggggattccgcaggacccagcagccacccggcagccacccctccctctgctgtcactagctttgggcagcgcgtgtctcctgcgtgcaggagcactgtgaagcctctgctgattcgctggcaagcggcactgtccaggcccccagaggtgcacttggcagggtggtcaggctgccccctgacatgagcactgtccaagaactgggttctgcttggcatctggggcaccaagagggggggccttgctttgagaccctgctctgcgggccttagccaggaatgagaagaagcttatgggttccagcccagcccagagcagtgagaccaggatcttaggactggggagaacggtgggggcagagagcctgcagttggtgggcccaacctgtagatgagaggctgaccccaaggcagggcaatccagggccgtgacctgcagagaatgcggcgtatttgggaacaaagaccctcagtggagactggcagtgggaccctggcttcatgctccgcgttcctcacctgagtccccacctcctggtctcggacctccacctgtccccagaggctgttcagcactgagggggcaccgccaccctgcgttggccagatgcgcccagcttccccggcagctctcagggcggcctcacccatgcacacggttctagcggccatgtgtatcacaccacacgatgggacacaggccctggggcgtgctcaggcctttgggggccgcgcagacctcctcttgccctgtttgtgcctgatttctccatcagaaactaatgacacagccagattcccccggatggtgccttccttatctgtcgcgagtgctgacagaggaccaccaagttgggcagcaggaattggagcgggcggggcctgttccctccagtcactcctgcacagcctcacagacacccgtgtcccagagagtggggagctagacagggctgtggtgagaacagtcaggggcctggctaatgaaaatagacagcgaggtctgccctgccggaggactctgtggtgaggctccctccggcctgctctgaacccttcccagctgcagtagaacagcccacagaagtcctcatgggcctggctcacccttttcatgggcacgtggctcccacaggcacgcagccgatcagaagaggccggagttggtggctcgcagtgggggctgggcatgttcagcaggaggctgctgctaaggggagctgggtctcctcaccagccctagcgggtttctctcccacactgtggccctgctgagctgcccagcactcagaagcgactaccctgtgtcctcgaaggctgtgcttccctccctgtgacccaccggccttgcctccttcctgctgtttgcttcttgggtgtcctggctccccagctccctgcagagccacgtggagacttgcaggaatgctcccagccgccacctccttccagtccagccgtgggcagcctggcaccagcagctttgtcctggcagtggcagcccctggagcaggggatgcatctggagccgtgccagccccagccgggcaagggggctcaggccgtgctccaggccgtggcagtgcactccgtggagcgtgtctgcctgtcccccctccacgggtgcacacaggtgctttttttaattaaggaaaagcaattgcaaagccgctcaatacaaatcccctaagctgctgtggatggggatgccggggcagtcggcctgtccaggagtctgaaacgccggcaccatctgtgttcctgccactccatggccaaatgacaccaccagcctttctctcctgtgctatctttcattaaatgaattgagtttgctgggaattgcccagccacaaatattccctcctgctcagcatgataggaatctaactgttcccaagcccctgctcctggatccagcagaaggttccatggcccccctgggactgggtaaggtggggggaggcacgagctgcaggaaattccacaggaaggtttccgtcgtccccaaccccgtcagatttggggtcgtaaatatgtgagtgtctccaagcaaagtgtgggccacctggaaaggtttgtcagggcaagggaatagttgcgttgaattaagtctttcccttcccatttccttcatcccattgagcacgggtggtgacagcaagacaggtacttgaaatggaagagtgtctcacgatttttggaaatgggcttcttctgtgcctgtttgatggagaggcagaaagttccctgtgggcttctgaggctgagataagggttggcagaggtcggggcagcctgtgtctggcacgcggtccctgggcccgcctctccccagcaggagatgaggtctgtgccccgttcagacgggggcccgtgcctctgccccccacgccccgagcttccgcatggccctcccccatgcctgtggagactcccaggggctactttgtcccctagaatctagaccagcaatttccaaactgctgcccgcaggtcaactctgtccctggcctctgtttattaataaagttttattgacacacagccatgcgcatgcatgtgcccatcatccgtgatgctttagaggcacggtgcagagtttctcgaagctgaaaacactcagcgtttgggcctctgtgacagttggccagccctgccctttcccccttcctcttgaggttggggtttttccagccccatctcagcctcatcccagtaggtacgtgacagaccagagcttcctggccgcctcctgggatctgagtgccatggtggtaatcgccgcttgggcatctgggttcatgccctctggggcctggcttctctggccccaagtccctgaaatgttgagcatcaccaggtcacctgcagaacatccttcccagtgcccagtgtgaccaaagtgacgcagcggcagagccaccaagaacagtgacctgggaagggctgagggcgtgagagcggcaggtctgcccggcaggcagctggaggggacttcaactcatccttgccactcgcttgacgttcccaaacacaaggggccatcctattgggtgtttgctcaattcccccaagaccccaggcaagccggctgcagcacatggcacgttaatgtcctttcttagccgctgagtccctgagcctcccagaccctcagcatcttcttcgttaacattgtcgtccctccagccctgcaagctggaggcagtcaggtgaggcgtgcgggagcctgtgggccaccgtcgccctcgtgaggcctcctgaggaggggccgttgtcacattccgggattcctgttggttctctcagctctttggggactgctgttgtctcccttcttcccagccctcttggaacgattgctgttataaaatactccgtatccatttttacctacctgggggcacccgcgtctgacgggagggagatttttgcctggaccaacaggaggcatctgaacctcagcctcgctggtctctggacagctgtgcgtggggcagtgcccagtcctgaacctcaggcccctcactgagctgcgcccagcccccatttctcttgggtgtttgctcagtggccgttccaactccgtggaggcaaaccagggactcacaactgggggatgccgtttcctgacttgtgatagaagttctagaaacagagcaggagtgctggtgcacacctgtaatcccagggttttgggagactgaggcaagaggatcacttgaacccaggagttcaagactagcctgagcaacatagcgagaccccatctctaaaaattctcttaagaattagccagatgtggtggtgggtgcctgtattcccagctacttgggaggctgaggcgggagaatcgcttgagcctgagaggtcgaggctacaatgagccatgattgcaccactgcactccagcctgggcgacagagtgagaccgtgtctcgaaaagaaaaatgttctagaagcggaatgctcagcggtgggatggggtgtgggaggcccgggccgtgagccctacctgctctggggtggggtgtgtggagccagccgtccaggtgtggcgcgagggctcagaccgtgtcccctgccgcagtgcacgtgccggaaggacatggtcaagatctccatggacgtgttcgtgcgcatcctgcagcccgagcgctacgagctgtggaagcagggcaaggacctcacggtgctggaccacacgcggcccacggcgctcaccagccccgagctgagctcctggagtgcatcccgggcctcgctgaaggccaagctcctccgcaggtgagttgccaagggactgccgcgtgactgcccagcatcacggggggtggccctgctgggtggcccaggccccttcccactggcaggggctccgggccgtgtcccactcctccctttcttcctattcccaccccgcctcctctttcgtcctcctcctcctgttctgtttctcctccagtctgaggcacagtgttttctcgaggcctcgctttgctggggtgggtgggctctgctctggcgggcagcgtctgtgccgttcacacccgcgggctccccatactccctgtcatgtccccgccaggaggctgaccctgggtggccccaggccccgtgccattgcctcagcagagccaccagccacatggctccctgtccctctcactcaccgcatttctgctgtccggctactcgggcccctccctggcgctgagagcagtcgggttccctgcaaggactcaacggggcatcaggtggggctgcttggatttgagatcgtggagaggatttcagaaggccggccccggggcgtgaccctggatgccctcctcccactcagaacccctccctgcgtatcgccgcacagaccctcccagccaggtatctggtgtccgcctggaggagaggccaaagcatctgcagcctcttggcttctgaccacaagaggccatggggacacggaggcaggtcccggcctaggaggagatccacttcatgcccagagtgaaggcgagcaccggcctccccagcccctcctctgggaagtgtccaggcttccagggctctgagctgcccttggcacagttgtcgacagatctcactcctgtttggtgcccaaggaacattcagggagcccctgagcatgagctggagccgggagggacggcacagagtgggctcagccaactcctccggggaagggccagagagcaaacatttgtgacttggcgactttgcaggccaggcctcctgtgtctcgacgtctcgactccgcatggcaactcaagacccttgcagatgatagacagcgaagaaatgcgcgtggctgtgtccgtgaagctttgtttacagaccctgaaatccagatctcatgatttttacatgctaccaaatacgataatttttctgttttgagccacttaaaaatgtgaacattggccaggcacgatcgctcacacctgtaatctctgcactttggaggccaaggaaggaggattgcttgagtccaggggtttgagaccagcctgggcaacatattgagatgccatctctacaaaaaatttaaaaatcagctgggtgtggtggtgtgcgcctgtggtcccaactactgagaaggctgaggcaggaagatcacttaagcccaggaggtcaaggctgcagtgagccgagattgtaccactgcactccagcctgaatgacagagcaagaccttgtctctccaggaaaacaaacaaacaaacaaaaaaacatgtaaacactgttcctagcttgtgggtcgtacccagacaggctgctggcaggtctggtctttgagccaacagtggtggccttggtgtgggggcagcctcccccttccctttgagcagtgaccttccctctgcagccatccagtctctgctgccttgatcttgtcccagctggcgatggatggtgcccactcgagacccagccactgagcaccaaggttgggggcggctcagccttggccccccaccacgctctgcagaaacaggccttggaactggtttctgaaaagtcacttctggtccagaaccttctcctctaaatgggcgccttctttttcaacacgtccatctgtctgtgagtctgggactcctgggcggtctgggcatctgtctcggcctcctctgtcttccccacctcgcggcctctctcggagaatgttccctctgccccgagtgttttcacagcccctcctgacagccctgccaaggtgaatctgtctcttctgctcttgttctgtccttttgatttcctgcctcctgtgtgctcctcatgaagagctgcctcctggtgaggctactccaggcggcccccgcagcacagagctcgtgcaccccagctcccaggcccagccagacgtgctatttgcataatggttaattgattgtggctcaggctaattggtcaacagagtggattgccaataaaccggcaccacgttccaggagtggaatgggactagaggccgtctaaattgcctgccaggaggagatgcggaagccgctgcgctcaccgctgcttggaaccttctttgcacgcaggaagtggaccccccagaaccagcccttgcgtggcctggcctggcctccctgccccggccaccccctcacttctagtcacgacctgctcctcccaggagccccctcccgccctctcccgcgccgccatcctgggggctgccttcacccagcagcaagcctgaataacaaatgaagtcagcttcccaaggatataattttcttgaaagccttcagtatgtaaaacaaggctgattcactttttttttttttttttaaagtcattgggggtgcttttctctggagaggcagatgggtgactcacgttccaaagcccaagctgcccctccctccaccagggaggtggtcggttcccccctgagcagtgccctctccacgtggcctgccttttcccctgagccaggctccctccctgagggcatatcttggggccagggcagccctgtctgagcatctgtggctcaggctggatcgggagacacagtggactggctctgtctcccagacaaggggcttgtggacacaggcgggatccttctctggttgggggagcatcctgggccctgcagggtaatgagcagtatccctggcctccacccactccatgccaggagtgccccaagtcgtgacaaccacagatgtccctagacatcgcccagtcccccgcgtgggaacccctgccctagaccaagggatggcatcagggtgggcgccatgccctcacccccgtgcagtccagccttccctgccctcggcgtggctgtgggatggccctcatgtgtttaccaggtgccccatggggtgcggatggttcggcacagctgcctgagctcagaggacacggcctactccctgctcgccaccttacatgggtctcttccagaactaaatctcgttgagcgagcgttgggggctgtttgtattcttccccctgatggatgggtcgcctaaaactgcagcctggctcctggcgggtgccctcagcctccccactcccggtggcgctgtgcgttctggtgccctgcctgagccggagccctcacagtgctctctggcacccacgcgacgctcctccatgcaaactctttccacgcgagaagcgccatgtgcacgtgctccagcaggtacgcgctccctgcaggacatctgtgcacccgcctcaccacagcctccctggcccactgctgctctgtgagcccggctgggcccaggcctcgtctcccctacccctccgagctcggtgctgcctgtcccctcctgctctgccttggcctgtcgcccctgcgccagtgcaggacaccgccacgcctctggccccgactcctgccagggctgccacggctgccacaccccagctgcattcctgagccctccccaccaacagggacctcagccctcagggacagaacctcacgagcacagggacctgccagcccctgcagggagtgcgcagcctcagggactcacttgctgtctcctgtctctttcctagagctgcccttcattttctcaaaggtgaaattcctcagcacagggtctagtcttgggggtggggagcactgggccactttgggtcgggggtgggcggctctgagggctcagcctggggccagcctcccagtcctccccaccttgtgagaagccctgagccagcgcggcactgaatgctgatggtcccactctgggtgctgcaggtgccctgtgttactgggtgacagggccagaggccgtccaccccgcctcctgccatacaagctgcaaaggacacctgcttccaccttggaaatattagtgcagttatctggactatgtcccgacatttggctcataggaatgagcccagcggcgtccagttaagcctggcaggctaagtgcttatttatctccactctctcctgaaacgccactgaaacaccagagagtgaagtgcagagaacgggagagggggcagtggcagctgagcacgtctccaggctttgaaaagcagggaagggtgggcaggagaccccatgggccggcaaccaggaggacagccagcagggagcagctgggctgcaccatggggccacagaaagacacagtgggcagacatgggcagctcctggagggctgcagggggaatgtaccacggggcctcagaaagacacagcgggcaaacatgggcagcccctgggggtgctggggggatgtgggggcaaccagcagaagacagtgggtggctctgggcagaagggaggcgccttcctggggtcagcagtggggcccagctgccagcctcacatccccccaacccccaaggccaggagagacaatagagggggtgggggtcctctgccagagaacaaaggggcccagtggagcaaagccacatatgctgatactggggctctcctaaagtcacaggctcctgccctcagcagcccctgccactgccttcaccaggcccagctcacacacggcttggcaccgtgcacagagggatcaacggccaggggacccgacacattggaggctgcgctcccatgacaaaggcagggcctgcacagcaaagaagggcagagctccgaggaaagaggatgcagtgagtgcagggccctggagtgggccgggactttgcattatggaaaaagagccattgctgtgaagaagaaacattccaggaacgagtggctctcggatgttaccatctagagaagagacaagcccacagtggattgggaggcccttgaagaatcccctcccacagcactgacagacagagctggaagataggaaggatcaggaagtcagaggcgtagtctaggaaatctagcccctgataggagtttcagaaaaagaaaagtgtcccgggacccaaaggctttgcatttccaggttaaaaagtccaccagaaagtccgcccaagaatggaaattacccaaaccacaatgcatcgctgtgaaatttcacaattcctggattaaacaaaggccctgaaagcttccagagcaaacagatcacataaacagctcaccagactggggctgggcatggtagctcatgcctgtgatcccagcactatgggaggccaaggcaggaggatcacttgaggcccagagttcgaggtcagcctgggcaacatagcaagaccacatctctaaaaaaaaaaaaaaaaaaaaaaaaaaaattataaagaataggagactctgttagcattggatttacagtcataatgccacaagctaaaagacaaaggaaaaaggccttcaaaagtcagaagaggaataattctccccaaatcttttacctagccaaattgtcaagaaatgtgtgaggggaataaggatctttttagacacacagagtctcgtattccacctcctttctcaggaagctgctgcaggatgtgctccagctaaacaaggatgtaaatcgagaaagccatggggttgaggaaacaagatctaacccaggagagtcaaggggagtctcaagatcatgggagaaggaaccaagacccccaggggtgtcatggagagaaggggacaccctgcataggagaccacagcaggagtttaagagcaatggcagggagctcagagataccaaggaagctaggcgtccaaagcaggaggccagttccagaccccagggtgggggcagggaatgcggcccgagttgctctgtggctcatggatgcacaatgtttatggggcataaaagcgtaaacgtggaatttggctgcaatggaagacggtggcaggtgcagggagagaaggggacggtcatggaggcgagcaaggatggccacaccctcaacacctgtgccgggagccagacccagaaacaagcattgggtgcagaaacacgcgaagggggatgaagatgtcagggtcaggaagaggcgtgctcttaggaccccacagatgccccaagtgatggctgcccctctgccgtgggctgtgccccccttgctgtgtctgtgccgcccttgctgtgtctgtgcattgagccctacccagttccatgtagtgtgggacccaggggtctcagcctggcactactgcaggtaggaaagggctgggctgcaaggatgaggccccagagctctggttgggcaccaggacagttctggggccctctggggcagacacagtaaggcttgaaggccgtgggggtgcccctggaaggctgcagcaggggagggccatggtcggaagcgacctctagggtgagttttcagggtgggggtggagggagggactgcagtgggtgggagaaggggctgtggagctgggggcagctgaggccaggtgagcggcatgggagggcgcccttctgctggtgctgtctgggaccagggcgggtccactgtgggatcccggccctacagccctggggcattcccagaccaggagggcagcccaccttgggatgacagtggtgacaagagccagttgcaccccagcgccggtctgaagcttcctcctcctgagcctgctgtctccatctggggcaggcacccagcatttgcctagccccctagtggagcctgaggctgccttcccagagccgtccttgggctgctgttgtggagaacgttctctggagggcaggggccactcccgtgtcccccatccacctcctgctccctgtgttagtgactctggccccacgcccgcccctgcctgcctcccacccctgcccggccaccccgcagcgaccttgtgtgcaccatgctgtgtgatgccatgcctctggtccacccgctttctgccttgagtcattgtggtgggccatgctgcagacatcggggagcactgattctagcgagttaggcagctgaggagcaaggagggccggcagtgactagtgttctaggaaggcttcctggaggaggcgccccagaagccagcatggagcacagggcgggcagagtggctgggagcagcggtgggcaggggtcaggtccaagtgtcccgagggagcatgggctgctgctggcccatgtgacagcctggctcaggcagaggtgaggaggtcctggtaacagaagccccggcagcgggcccaccccacccctgtcagatgagcctgccccaccttggtgaccacttggtccttggaggggcagctgccacagggacccccgtgggattgaggtgtccgagtctgagcccatggggacaggggacacgggaagcacccggaagccgcagccggcattggtgattgtcccggaaacactggcgctcccagctctgcctgactgctggcaggcttgacgtggctggatctcaactggggaaggggagaaaggccactggggagccgggctgtgcggcctcgagctcatggcctagagaggcccctggccaggccagggcttagggcagctgcagggggtgggcctggaggaggtgcagatatcacatgcccaggggaggcactagtgaccagccaggcctcggcttctctgcactcccggcttctgcctgagccccctgggaaccaccccctccgcatctccaaaaagcttttgcttccttcctggaaagaccctggaggtccctgggggaacctggtgtgaggccctggccgctcagctgcagggtcacctggctgtcacttttcctccctttttcagcccctctctctcatttctaagaagtctcagctcagccaagcctgtaagcctcaggttgaatcccttacttggggctggtgtgcagggaccgggacctccccgatgtaccccaggattgtgggtgtccaggttgggcatgcaggatgcgcctcctcttggcccacgcctgccccgtgagcagatcctgggctcagggcgcagaggaggccctggcaggccctggggtgtgggcacaggtcagagcagcggagtgtgagctggggctcccatgcacctcatgggctgcagagagaggacccagggagttggggacagagccaggtggccaggaccaggcgtcctggggagttgagcagaagtcctagagaaaaaacccgtgaaatttacattctagacaaattagtctgaaagaaaacagacactggagaaagactgaggaggagaggaaaccaagtctagaaaggaagaaagagcagaccaaaaggccggggctgtcgtaagtgtctttttcgttccgtttgtcgtctaggcattttccatgagctgctgtttccctcggagctcacactccctgtgtctctgtcccgtggcacacgcggctcctgccgccccgtcccgcccgtcatcccacctggtgtcagtcggcttcccatctccagctgtcatcagcgtcccccgcttgacaccgtccccgccgtgtccattgccccgtctccctttggtctctcctcccaacacggctcctgccccgcaagagcagaaccccacccagggttccctttacccccggcctccagccaggaggccccctgctcatggagcgctcttctgggggtgggcgggggctgcgtgctgccggacagagtgcacagacctagggctcttccctccctggtctcccctcctgcctgataaacctccctctccaggtctcaccggaaacggagccagcccaagaagccgaagcccgaagaccccaagttccctggggagggtacggctggggcagcgctcctagaggaggctgggggcagcgtgaaggaggaggctgggccggaggttgaccccgaggaggaggaggaggagccgcagccactgccacacggccgggaggccgagggcgcagaaggtcagtccctgccgggccaggcctggcaccgctgttttcccacccccgtgggcatctcctagaaggaaccagtgcctgctacagccagagtccccgttttgtaagaatctgattcagtggctttcttgccagggtggggcatttcgtgaaaatagacatcgtaaggtggaggccgtaagaaaagtgcctccgtccccagaattgagaagagcagttacgagaggccaggcgcagtggctcccacctgtaatcctagcactttgggaggccaaggtggcaggatcacttgagtccaggagtttgagaccctgtctctacttatgatataaaaaaaatttaaccaggcttggtggcttgcacctatagtcccagctacttgggaagctgaggtgggaggttgaggccgtagtgagccgtgtttgcacctctgcactccaacctgggcaacagagcaagacccagtatcacaaaaataataataataataaaagaccaggatgctgtatatggcccagatgctggaacgtgcctgcagcagccacagccacttgtgggcagagggctggtcctgactgtgagctggggcccccgtcagcaggtctcccacctgccctcgggcctccccactctcccggggctggcaagacagggggcagccgccttcccacaggagtgtgaaccagcagttgtgaacggggtgcggggggccgggaggcagtctcagaaacattaccttccccagggggaggttttggctgtggaactcccacctgtgagtgtgtaaaggttcctattccagggttgacagcattttgtttctggtgactgggttttatcttctcagtttagagctttagctgcttgggagtctgtgcaaagtggctgttcccagctagggctccccgctgggagcccttccctctcccaccctttccaggtgccatgcagggagcaggtttgtggggtgtgctggccagcctgcctcccaccaagggctgcccccagccacagtgcctgaggcccaggtcatgggggccacattcgccggagggtcctagtcctcagtttccctctgtatgagcccaacatgacctggtctgcctctgaggtgtcaggtctccaggacgcgctggtgcccaaggtgaatattgtccttggaacatggcaagaggcccagctgtggtgccattcagcagatgtgaggtccctcccacctgccaggggcagccgtggggtgcctgatctgtgacgatggggtcgtggccctcgcagtactccaggaggcaggcacgcccctgccctccccatatacatggggcagatattgagggtcacagtttgccagtgcctgtgggcctgaggcaagaaaagtgagcatccctgggggaaagagcagaggccgggggtgagtttgcccctgacggaccacttactcggtggggtacgtgggccctgcgtctgttcagcacgcctcaggagggtctgccggcctagagaggcaagacgaggacagaaaaggcatcgtgggtagaagagaaaagcacagctgtcgtggcactgttattatgtagcgacaattctctactgagaagcagcaagcaagtctacaggcagccgcctggtgactcggggatcgagcggagctgccagagatgagcgacaggcacagaaacccaatctcgcccctcatctgcgagccgctcgcagcaaacatggctcccaaagatgccccttatggtgctagcaaccagaaataatggatcttagaataaacctaaccaaaaaaatgatctttatggagaaaattaagagactttttttggaaataagaaagaattcctaaataaacagaaggacctaccaggtgttaggagagctcttaagcggacaactaacggcttcccccacattctctgcaggttcagtgcagctccatttgggatcccagcagggtttgctgatttaaatgcaggcggatgaaagcccaaggcctgtcaagaggctggggccacccttccagaaggcagggcttgccacagagcttgcaggacccaagcaaagatggcaaaaggtctaggaataggaatcccggagcagtggacttggtgtgagacctcagtcccctccctccccctgtccacgctgcggcctctgtgagtgccctggggccgctgaaatgaaggaccatgaccttggtggcgtaaaacaacacacgctccttgtctcacagctctggaggccaccagtctgacaggcctcactgggctaaaatcaagctgtgggcagggctgcttcctcctggggggctccaggggagaacctgtttcctgcctgtctcagtgtctagaggcgcccacatctcttggctcagagccccttcctcctccttcacagccacagtgcagcctcttccggtctctctctgactcttaccctcctaccttctacccggtgaggaccctgggttcccaggtctcccagatgctctcccatgtcagggtccttcactgagtcccacctgaatattccttctgccacgggaggggacagattcccaggctccagggataaggatgcagatgcctttggggtcattcctctgcctgccacatgcttaggcatttctgtcaaaagagaactggcaaactggaaacacaaagcaggaaagtatataacccaaggctaagtgattgtttattaaaaagcacaaactagaaaaataaagatgaacaaattcagtgactctcaaatccactgctgtttatcaaaggatgaacctttaagaaagtgagaagacaagccgataagtagggaagacactcgccacccgtcaccgaccaagagcagataagaatgcctgaggaccaggaggggctcagccccccaaggaagagggcaccagaagaggagatcccttaggctaatgagcccagcctgctctgggaagcgctgcagacacgctgctgtgtgctcctcggaccaccagaggtggaaacacccaccgtgcccagccctggaagccggtgcagcgggcagcccagtcccctgttgcctgggacctgcgtgagtccggctgcattggagatggacctggccttatccagagaagtggagcatttgcaaactgcacacccagagctgccctcagggcacgtttcctggagagaccccctgctggtggggcactaggactgtgcagatgcagggacaggcaaactaaccaacctccatcgatggagagggacggggaaccagcgcctcctgtcaccctcgtctgccctggaggcatgagcgctggaggccactgctccacgccctgtggctctcggacacgacctcgcgtggcacggggcttctcatatgctgtgctccgtttgtttaaagtccacagatggggcggctgaaatggctgaaatgtacaatctcacacctgtggaagcgggaaggtcacggtccaggtgtcagccgggctggcccattccgaggacccaggaggacctctcccaggcccctttcctgggcttggaggcagcacctttgtgttcccgtgttctcccggagtgtgtctgtccagattccccccttcctaaggacactggccacgctgggcctggcccgccccaagggtctcatcataactcattccgtctgcagtgacgcccttcccaaacaaggtggcaccccaggtccgggggctaggactgcagcaccattcaacagcacagggactcagctctgcagcaggcgaggggcttcctgcagggcaggagcaggcacaggtgcccatttgtgttgtcatcctgcagggcctgtgtctacactgcaggtcctctggggtttgggaaatcctcagaaataatgcagactccagcaggcaagctgggcgcctgagcatgggtcgtgctggtagaggataagttcctgggctggctgcggtagccaggcctcctgttttctgagcaggagtctgtgtttgattctggagacggtgagccccaggcgaggtcggcaggggagtgggggatgggcgcagttcaggttctattccaagggggactgtgggatgtcgctggagggactggcgtgggacagggaggtggctgagccgtgaccattctccccacaggatgggctggcaggggtgggctgggcttgggctggggtccctgggggtggggggctgcgtgggccaccttgagcttggaccttgtgaagctgcccttctcacgagtcagaacgtgctgggggctgtgtgtggtctcacaggagatgggtgagttatgggaaaacaagcaggcagagaaagatccaggcttgggtctggggacccgggcccacccaagcccacccgttaactgcccatgtgaccctgagctgggacaccgccttgatggacccttcaggagggcagagataagaggacacgcatcctccccaggccggcgcggtgggggaaatcgggcaggctgctgccgccgccgctgccacctgtgggttcaggcagcgaggaaagtggcccagtcctgggaaggcttttacagagtggagctggctggtcagagtctgtcctgggttctcagtggggcctcctgggaggggtcacaaggatcccccgtaccatgggtgtcttcctccctcttgagcagactctaggggctggccagcctctggctggaggaagggcggccaccagctcctgtgacttgttttacccaactggctagcaaaggactgtggcttcttttccttttcctttcctttcctgatggagttccgctctgtcacccaggctggagtgcagtgacgcaatctcagctcatgcaacctctacctcccaggttcaaacgattctcctgcgtcagcctcccaagtagctgggattacaggcgcccgccaccatgccctgctaatttttgtatttttagtacagacagggtttcaccatgtcggtcagaatggtctccaactcctgacctcaggtgatccacttgcctcagcctcccaaggtgctgggattacaggcccgagccactatgcccagccttcttttcttttctttttttttgaaaccgagtcttgctgtgtcccccaggttggagggcagtggtgcagtcacggctcactgcagccttggtttcctgggctcaagcagttctcccacctcagcctcctcagtagctgggactgtggacgtgcaccgcaactccgctcatttttcaaaatttttagtagacacggggtctcgctatgttgcccaagctgctcccgaactcctgggctccgcctcagcctcccaaagtgctgggattacaggtatgagccactgtgcccagctttcttttcattaatgtgactaactgttatttactaatcttcccaagcccactgacgagacagccacaccctccccagccccggcgttacctgctctcacttgggcctcaccatggccttggcctccaagagactcaggttcagggaggtcctgaaccagggggtcctggttctcctctggtctcccctccccatgcgtggtcctggctggatgggcggctttcctcccctgacagtggcagttgcccgctggagagaagcctacaccgcgtgggagggaggggaaaccaatggctcgtccagctgcctggcgtaggtgaggccctggcctggtcactcaccatcctgtttaaagatgtacagggcaactcgctccctcccgagatccccgggggtccacacgcccggtgcagtggtcacggtgccaggaggctgggcctggtgcatctctgaggcctgtggcttccacgggtctctgaagggatcagcccccacagaaaggccagggaccagcgaggagggttaggggctacgttggtggcacgtcagggtctctgcccagggagggctcaggactggtgctgcccaccccccgccccccgccctggacacccttatctctgttccacgacagagactcctgggaaggacccaatctggcaggggtgggcgttttcttggacacagccgttttcccgggagcccgaagtcccaggagcctctggacgagaggtttatctcgagagagcctcataaatgcatgttcacagtcaggggcacgacaggaaatgcatgccacagtgctgcgggaaagatttcctaaagcggtttctggtcctccttgaatgccagtttcacgcccctaaaagctatgacgctgaggcacctttcagggcctagcagtggggtgtggggttttgtgttttcatatggaacaagctgggaaggggccagaacctgttgctcacaggggccagggggcatcagcatcggggaggaagcccctcaggaggagaggtgcctggggggcggttgagaggctgcttcccagtggctgctggtgtcccctatcccattcttactggctgcttcaaggtctgggaagagcggccgccctattgcccagcgctaggagggactagcagccccaccagccagccctaaccccagaaccaagcagaaagcaggaaggcggcctcgtccacctctcctgagcctccggggaggccccgcctcctggaagaaggcctgcagtgcaggacacacagggtcagggggcagagccaggatggggacccaggagggctggcatagtgccgtcctgcctcccagagggtggaaaggctgcggtgagtggggcagccagcccccagcccttcccctcccctcgccccggagtgctgctctcaggagaggcctcgtggctggtgactggttttagaacacggaaagcaaaggctgccatgtctggagggcggccccagctcatagtgaggggctgtgagctcagcccggggacccgccagcacatcccagctgggcctctgggaccgtcaggcgcacccggctgcgggttcagcacgggagggtggcagtgttgaagggggtggccagagagcccctgagaccggggctggttggcccaggcatggaagccaagcacgaaacttgagggaggggccccataagccaggccgaagctggtgagttgatctcggcagcctcggagcaggaacagagtggtgtccttggaaatgggtggtttcttgccccctccacagggcagcctgggcctcgggcctgtcttggggtttgctggaggctctggtggaaaccccggcgctggggaggagtggcctcgccaccaggcaggctagtgagccctggtggtggggtttccgctgtgacaccttccctccacccaaaaagagtgctagcagggcctcagctggctgccctcgggggcctgggtgcatcctgggccccatctgtaccatggtccctgctctgtcctgaagcccctcacccgcttccctccctcaggccaggcaggtgaggggcgtgccaaggtccctgtggagtgtagtccccatggcagggacagagccccaaggaatggcccacagcaaggacagagccccgaggaatggctgcggggtgtgccgccgtctttcagggtgtccttcctagccttgggcatctccctctaacagggtcccctgtgtgtctgcccgggcttcactgagcctgggagccgacagggagagggctggaaacttgttcttgtgagtttgagaatccagggcaccagcaggtgcgggctatgcgtggagtgcgttgaggctgccgccattgtcattcactgctgtctccagacaggggatggggtggcactcatcagccgggcacctgaggctcaaattatgtcccactttgtctcccatgcctggtccctccgggagacagaaccaggcagccaaccagggagggctgtggggaagcgggacttggggccatccctgtccttggaggaggagggagagagccctacagtgtggcccttggtgagaggacagcccccgggaggcctaggggacgatggtggcctcagctccccacccagccttgcctcccgagcagaaccagggcctggggcggtcacaccagccgcccctcagctcccaggaggccccgttggtcgggggaggatgccagccccttagagaggcggggactccccagggaccctctgagcaggcacctgtggtctcgtgaggacagcccggctctgtgtctctggccccacagccctggctggagtcccctgtgcacagagctgcctgttgtgtgtgaggacagcccagctctgtgtccctggccccacagccccggctggagtctcctgtgtgcggagctacctgttgtgtgtgaggacagcccggctctgtgtccctggcccccacagccccggctggagtcccctgtgtgcggagctgcctgttgtgtgtgaggggtgggtgggggtgccggctggggactctgatgagtgtttcctcctcgcctccttccccaattcctcatgtgtgcactgagtggccctgcagctggaggccgtgaggctgtgtcctggcatcttcctccctctcctgagaccatcgatgccccaggtggggccctcctgggccagatcccacgccagcccctgcccttgaagttgaacccggcttgggaagccggcccagcagtggggggcctgagtcccagtccccggtgaggctggatgggcaccgcagcctgcagtcctgagtgaggctgggcaggcgctatcatggacgaaggaatattggatttccttaggggaacaaagctgtttgtcctcaagtgccttttacacacgcaggacagtggctttcctgacaggcgctcggggtgaggcgtgcggcctctgcagcctccccgggctgctccagcttccagccctggtgaagcttccggcccctcccctctgcatctccacgcctctgctcccagcctcccagggagggggtgcctcccctctggcatcggcagggaaaaagtatttcttcccacgccagcctgtctgctgtgtccagtgtttacctcccctggccagataacagctgaggggccagataacagtggaggcggggggcgggggggggggtcatataacagcggggggcccggataccagcggaggggaagactgcgctccctgcaaggccagacaggacctgggggtgttccaggctcccctgccggggtggaggtcagggaggagcccggccagtgcccccagtgccccagaatgctcaggactagcaggggtgggggccagggcagtggcgggggctgccttcaccttatggctgctcgcctgtccttcttgagaaacaggtgggcgtgtgcctgccaaggacaccgtgggcggtcccccaagcctgcagatggagctgggtagggtgtggggaggagagctggagcagggagggcagggccgcctccactcctgggggaggctgtgggctgggggccccttgtgggagtgtgtggggcagtgtggcttcctcctggctgcagggtctgttgggggagggtcctcacttgacccttactggggtcagtgtgggtcaagggttaagtgtcaccctcggcccttgggagcctcattgctgagggtctcagcgcttaccactggtcctggcatcacggactgtggagctgggggcagcccgtggtgggttttatagcaagtggtgagatgtgggcgctgtgctccaaaccagaccccgttaagtgccacatggtcaacagtttagtgtgcagaaatgaatttccttctcttaatttttccttatttttccagcctgttgggggaggtggaggtggtgaaatgttagcagtgaccagttcatcctgatctgcttgggaccttccagttttagcactgaaagccccacagcccaagaatcccttggatatcaaccacggttcctccttccagaatgtcccaagagccttagggcctggagacacacaggtgggggcctgagcccctgtccccctcctccagatggagcaggcagggccccagggccccagggctcacggtgttctggggtccacagtgtgctgtgcggccaggctggtcttcctcgaggacagggctccaagttgccgtgccacaacttaccctgagtgcggcggccctcagagggattgccccggcacgagcttcccacagcccgacacagagcgccgctgggctcacatggagctgtgtgcagggacaggccctcctgggcactccaggacagaaacctttcccagcatctagaggcccctgcatccctcagctcgagtcccttcctctcccttcacaggcacagcgcagcctcttccagtctctctctgactctcaccctcccgcctcatcttgtgagggccttgtgaggacatcgggcctcttggatcatctaggatcacctcccatttcactcagtcccacccacagagtcccctctgccagagtcccccatgtccctctgtcatgtcccacatccacatgtccaggagagttgggacccgcacgcttctgggggctgtgattcagccagccaggctgctcatcccagttttattttatttactgcaaacccgtcctggccccaaagtaaaatgccaccaaacacatgagtcaactgtcccctccctgtcacctgtcaggaaatctccccattgctggccccggggagttccacgcggaagggtgtcgggccccacaggcccatctgacgcttcctggttcgctcatgtgaccgccaggttggggttcgttgattaagattttgtgcgttgttcaaggttttactttcgtcaaaagcaaaaccttaacgtttctacatcaacagtagaaatgtacgtaattcggatacacgagaacacaaaaagtgcttctcccccacctccaccgggaaagtgccatttggtacggcccacccaggtgggagcccagaagacagagcagcctcccctggctgggtttggtgacgcgtctcctcacctcccgtgaccccagaaggcacatagagcaacacctggtgggtcctcacaggccttggcaggcaagtgccgctgctgcgcctgcgttgtggggagaccaaggcctgggggtgcctggccaggtgcccctgcggtgatctgaggtggcccgaagcctgtgttctctgcccacccatgttcgtgtggcctctctgggtggaaggagccctcgaccatcccagtcaaagttgggggatttctggggagcgtgggaccagcacttgagcccgggttctcctccctgacctccctctcctcttcccacagaggacgggaggggcaagctgcggccaaccaaggccaagagcgagcggaagaagaagagcttcggcctgctgcccccacagctgccgcccccgcctgctcacttcccctcagaggaggcgctgtggctgccatccccactggagcccccggtgctgggcccaggccctgcagccatggaggagagccccctgccggcaccccttaatgtcgtgccccctgaggtgcccagtgaggagctagaggccaagcctcggcccatcatccccatgctgtacgtggtgccgcggccgggcaaggcagccttcaaccaggagcacgtgtcctgccagcaggcctttgagcactttgcccagaagggtccgacctggaaggaaccagtttcccccatggagctgacggggccagaggacggtgcagccagcagtggggcaggtcgcatggagaccaaagcccgggccggagaggggcaggtggggtggagcgggggaggcagggaggaggggggcaggtggggtggggcaggggaggagggggcaggtggggcacaggggagctggtggcgggggagggggcagggaggaggggacaggagggctgactgctggtttcacagggaactgtggctcttctcacagggtaggtggggtgtctgtacttagagaacagaggagccctgtggttctttgctgggacagtcaccccaggagaggagactcaggcctcaggcacgccgagcccctgtgtggctccgagggagccccacccaggggtctgtagcggggccctcactacagcctgttgtgtgtttcaggcaccgtccacattttccaaattgaagatggagatcaagaagagccggcgccatcccctgggccggccgcccacccggtccccactgtcggtggtgaagcaggaggcctcaagtgacgagggtgagtggggggtccccaggtcggctctcatcagccctgctccgcgctctgctgctgctggagggggggcctggctcccctgcggcttccttcccccacttcctgggtctcctcccctgaacccaggcctttctgtggctctgccgtagcgacaggctgtcactggggcaggtggtcgtgcggggaggcagctgctgttagagatgctcggctctgctctgctggctgggctgcccatgatgggcggttcagggctggggagcttgtacctccccatggaagattcctcccagggctgagcacaggcctctccaggacttggagaggttggaacaaaaggctcccgcgaagctttgagtgggaggggaggagatggaatcttcgatttaaccctcagccgagagctgctgtcttgtgtgcagaagtcctgctaagccagtttttcaacttctgcttcggcctttcattggggatgcatgtagaatctgaaaatggtctggatggcgtctttcatcctgcatgcaattggaggggtggggagaggagggttctagaagcgcgtgggatcacagggcgggagctcccaggagtggaggaatcggcacggggacagaggaatgaccaggggcccccgcgggctggcttgggaaggggtcttgccttctacccaggtatccttccagaaggcatctctggggcctccgtggactcccccactccccacaccccactgtgaccctttggtgagaccggagcatttgcctgtgagaccatcacggccccagaaccccaggcattctggggttgtgagtgacagacgcagccagtggctctgttctcatccccagggcctcggggccgcttagggccttccctgggctccgctggcggtactgtctggtttgggttttcagaggagtcttggcctaagggcttcctgagtccaccatgggagacctgggcctccacctcggggagcctgccctgccctgccctgccctcctctaggtgaaccaggggcagtgccacagctgggctgatcccaggaccccaggctcccctttaggttgggctgaggattgggccacaggagtgggcaccccacttcctggggacagcacccctgtgtccacaggagatgcagggaggggacgtggggagattggggtgcggcagctggcaatggaggccattagagttcaatgggaacaggcaacaggtgggagagagaccgccgcggcttctcagcagcagacctgccttccgggagagtgtccccgtcacgcagctcttcctggggcgggctgccttggcttcctagccctggtcacggcccctcctgactccctgtcgcactcctctggcacctcccttgagttcagtgagtctgtgcccacctaagacaggaaggacagtgtctctgagtctcggctggtcactgccgacgcccccactcagactcagaccccaggacgggtgtagggcagccggggcagggctgggcactgagtttggccagtccttggcccagaaggccctgggtgagtggacggctctggatgtccagggagaaccaggtgttgggggaggggctcagaggaaccatgtttgggggctctggcctcaggtggcagtcagccgagacagacgtgtccccctcctgttgatgggatgggacgctgcagtgtcagcttgatgggcattgtggagaatggggcagccaggaggcaggtggagggggagctatgggccagggaccctgtgggcagccagggctgtagacccggggccatcccctgggcagttggggtgattccttggacgagtttttagggggctcaagtgtctctctccctctcccctctgttcttctagaggcatcccctttctccggggaggaagatgtgagtgacccggacgccttgaggccgctgctgtctctgcagtggaagaacagggcggccagcttccaggccgagaggaagttcaacgcagcggctgcgcgcacggagccctactgcgccatctgcacgctcttctacccctactgccaggtgggcaggcgggcctcacgggtcccagagaaccccaggcaggggcggtgggagagggcgagggaccgggcaccccacacgcctccctctctcacgcagggcagggtgttggccagcaccccgagttgtgagggcttgttcctgacagccgtaggcagagcctggtctctgggttttattggaatgaagcttactaacgtgcccatgtgcaacatgagccatggtggatggggcagagggaggctgcggaggctcggggtcactgccctcagggagcgcccgtgtctggtgggcgctgagatgggccgggtggtgtgggagtgcagtgaaggcccaggtacaccacctgggtggccgggcggggctcccgcaaaccctggcctgtctagctgagctgggcacctggctaaggtcctgtttctggtgctctttccatgctggcctcgcctgtcctctgcacccagatggggagctggcctctgcccacggccatcccaggcatcagcacccagcccagccgttttcctcggatctcttagatccccccttctctcttcccctgggcatgcagcctccccaggacaggacctggccacatgctttgcactcccagctcctagccccatgccaagcatgtccaggcatcagcagagctgccctgggttggggacgtcaccccccaggcctgtgcgccggccgggtctgggtggacagagccagggagagtgctgtgccgagggtggtgagcctgtcttggggctctgctgctgggagctggatttagtgctctggttcctgagacaaacaagacctgacagccgacaccgtctccaggcacttgctgtcctttgtgaggccagagaggctgctgggagccacagggcctggaatgccacttcagacatgcgtcttcctaattccccttgccaggcagagtgtggagactcgttcatcacacaccacccccagcataccccagcgccaggggccacccagcaccaggggccacacaggccagcctgagctctgtgtctggatgcaaccctcatgggaaggtcttcggcgggttggggacagggtcagacagtgtttggggatcctgactttctggaggagtgagaagaggggccgaggtggctctggccatctccccgacctccccctccagagccagggggtgtcgaagcctggggcaggtgccctgagagaggtccgcgccgcccgcccgcctgccccacacatggctctgtcccctgaaggtcgcctctcccctacaggccctacagactgagaaggaggcacccatagcctccctcggagagggctgcccggccacattaccctccaaaagccgtcagaagacccgaccgctcatccctgagatgtgcttcacctctggcggtgagaacacggagccgctgcctgccaactcctacatcggcgacgacgggaccagccccctgatcgcctgcggcaagtgctgcctgcaggtccatgccagtgagtgccactgtggggcccagaggagctgcgccctccttcagggtgttggtgggggtgccggtgggggctccatcctcccctgcggagggccacaccggcccctctccccaggctgcactttcagggccagggcaggggcctcccccggtgacttcctgcaatttctgactttctcatccttcccgttgtggtcccaccatctagagcagggggaaaggctgtggccatggaagggctggatgaccgcatgccaccctggggcaggacagggcctccaccgcccccagcatccagaagatgccagtgcaggcccaggtgctggcctctggtgccagcctctgcggaggaagcctctgctccaaggggcactgggctcatcccaccctgtccctgacacccagaagctcaccctagggccagagcaagaaatgggccaggcaccccgtctctccgcaggctgtgttccctgagaatggctgtctctgccaagcagcctttgggggcaaacatccctgcccttgaccttggcccaggcagggttcctcctcactggccctctggacagttctgccgagtcttctccaaggcctgggaggcgacaggaggaactcaggcagccgctacgcctgtgatttgtggctgtggttgaaactgatggtcacagtgagattgcagcgtggtcagggcgtctgatttatctctgctctcagggacccctccccagtcctgaggctcgaccatggtcacagacaagaaaatggatgtctgtctctttcccacgcacgggggggcggtggcaggaattggactttcagggaaggaggagggctctctggagacgtttaattttctgtgcccctggcagccatagatctgtgtcggtttcctcctggcggtggcctgcctgggggctcgcgttgtctcctggctgggaggctcttcactctgctttgctgggcctgggtttgagatgtgcccccggggcagatgggctccctgggggaagggttgccgagggtcccaggcctgccacagccgggccgccccagccaggctaccccagcagacgcccccacccccagccgtgcccaccaccctgctgctctggaggcagtgaggtccccgcccccagcctcttcagtgggccatcagcactggcagagagccccttccacactgggggcagtgatccccagcagaggcagagccctggggggcaggcggcacccctgccctcgctctgggggcatgattcggccttttgtgccctttccccatttccagacccagggccacatcccacagtgagtctcccttgcggctttggcctttctggacatagcaggaggagctgctgttgggggtgcagacacccaacaaggaggggccctcaagacaccaccaggctgagcgcggcagacccagctggagctcagggtccctgcttcccctcctgcgtcctctttccacacaagtagcttccagacctttctctcgctccacatgcagtggcctggattgaagctcagagggtgggaacagcacgcaccctgaatgctgcagctgcgtgcggaggcctcgtcactccacatacggacactggcccccaagttacccggcccctccccctgagtttcactcggctccccaagtctcacctgccccccagatctcagccagcccccgctgtcttccaggttgctatggcatccgtcccgagctggtcaatgaaggctggacgtgttcccggtgcgcggcccacgcctggactgcggtaactcgctccccgcagcgggggtggtgctctgagaggcctgggccccggccccactccagtggggtgactttggggcgtagtctcccctccgtgggcctgggttccttcacctctgccctgagggggtggaacccaagggattcccacccgtcactttggtggctgctaggttgaaatataagggccgtgggctggggacggttggcagatcaggccccaagcagtgtgtggggagcctgctccgagccctgctcatccagggctgtctggtctccacaggagtgctgcctgtgcaacctgcgaggaggtgcgctgcagatgaccaccgataggaggtgggtggcaccgcgcgttggggctggagggccggaggggagcctgccctgggctgaggctctgcagggtgtgaccccagtgcctaggggttgaccatcacctccacataaccgccctgtgtcatggatggggtggccagggctgaggaggagcatacgcctgcaccgaccttcctgaagttccccaggccctgacccagccgacagccacatcacgcccagcccctctgtgaccagcccaggtcctcagaggcgcacctgaccccgctgcacctgccctcccaggtggatccacgtgatctgtgccatcgcagtccccgaggcgcgcttcctgaacgtgattgagcgccaccctgtggacatcagcgccatccccgagcagcggtggaagctggtaggtccttgcggtcgaggcccaccctgcccgtgcctctagggctgccggccatgctcggctccccacctgcgcgatctgaagcggtctttcctccaagctctgcgtctccatgggggtggtgggcagctttcaggaagccagtgatcccgacttcagcaggtgtgttattttttgaatccttccccgaggtgcaaggtacaaaaatcagaaggcatcaagggtggcagagataagcaggccccgtcaggtgtggccttgggggcatcctctgcagaatcgagcaccccatgcagtttccaccttcccacaaaagcagaggcaccgcacgtgccccgacacaaccgggctgtctgatctttgctgtttttctaataattataacaagcctgggcaacacgatgagaccccatctctataaaaaaaataaaaaacactagctgggcgtggtggcacacacctgtggtcccagctactcgggaggctgaggtgggaggatcgcctgagcccgggatacccaggctgcagtgagctgtgatggcaccattacactgcagcctagacaacagagccaggcactgtctcaaaaaaaaacaaacaattgtaacaatgcttagcgtgagatctgccctcttaagaagcatctgaggttcagtacagcattcaccacgggcccagtggtgggcagcagggctctgcggcccgctcacccgtcctgtataactgacacttcacacgtgctaagcagcagctccctccgcccaccccagcacccagcactctgcttctgtgtgtttgcctgtgttatagaccccacgtgagtgggattgtacagtctttattcttctgcgaccggcttctttcttaagagacagggtctctcactctgttacccaggctggagtgcagtggtgtgatcacagctctctgcagcctcaaactcctgggctcaagcgatcatcccgcctcagcctcctgagtagctgggaccacaagcacgtgccaaaaagttaggttaactcccaatttttttttaaaagatggggtctcactatgttgcccaggctggtttggaactcctggccttgagatcttcctgccttggcctcctgggtagctgggattacaggcgcgagtggtgtctttcatttggcatagtttcctcaaggttcatccacattcattcaacccaaatatggcaggagttccttcttttcctggctcagtgatgtgccaccatgtggatggacgacgttgtgttgatccgggcacccgccgatgtctctgccttcaggctgttgtgggttgcgccgcagcggatgtgggagtgtggttgtggtttggagattctgatgtcatttcctgtggatacagacccagcagtgggcttgctggaccgtcgggcagctctgtttttagcactggaggaaactgctctcccttgcggctggacggactcccatccgcaccccccgggtgcagggctttccccttcccctcgtcctcactcacacctacctttgacttttttgtagcagccgccctagcaggtgcgaggtggtctcgctatggtttgatttgtgttctcctggcggtcagtgacgctgggcatctttgcacagtcctgttggccatctgcatgccgtctttggagaaacgtctgttctgctccttcgcccattccgtgcctgggttgcttggccttttgtggttgagttggaggatctctgctgctccactcttggtgcacattgaggccccccgtagatgcgcgcagccaccttgggcgtagcggggcctcatcgtgggggcttgtgaagcttcctcctgctctcagcaatgatggcccccctttggggaaccccttggagccacagggcagtcaggagtggtcagtgctggccaccagctggctgtgcacttgggacagattcctcgacctctctgtgcctcggccgtcccttctgtgctgtggggttgccacagtccccgccatgcagggttgcagtggtgtgagctgggcccactccctaaagcatggaccaccctgtctgagcactagcagctgctcagggcttgtcaaatctgcagcctcgctcccccaggcccccagtgtcacctactgcatttgatccacacagtgagagcctgtggggtcatcctgcactgtctgttctgcaggtgaggagcctggggcctggaggggcttggccgatcatggcctgggctgcagccctgcagggctgtctgctgcacaccctgtagcccacctgcgcacaaggcacttggggctgtccacgcctgctggaaaatgacactcagctggccctttaaatcagcttcctgcagagcc[137 bp omitted]cccgtctctactgaaaatgcaaaacttagctctgcatggcgggacgtgcctgtgatcccagctactcgggagactaagg[131 bp omitted]tgctggggccgcgtccccactaagggctgtgcatgtggcagcgctgatggggaggacgcatttgtccctgtgcactccggcctctgcacacgtgtctcgtgggcccctggaggctgggcccgcagccagtagcacccagcagcgtcctgcctgcttttcctgcctggtttatcttcccagccgcggacacagtgcctggtgttgacattcaggcttgcgtggaggtggggctggaagcagacagatcagtctggcagggtgggtctgctggggagaccacaagggtgggactgatgccggccacaaagcccgggctcccatgcactggtgcgaggtgcccacgagcccggcgggcttggatgccatgcttggagcccacaggtgctgggccacctgggcagggctgtgcaggcagtcacagaggctcatctggaaggggagccctctttccttgttcgtggagtggagtgtgcagtgggtcacgccggcctggccgggcacggccaggcgattaggaagccggcagcccgcgggtgatgcttccgaggcaccagtgactcagtccacaaacgtgggcgtaaaaggcctcatgattcaggtggagtgatggtgcgatgcgtggtgcagtgataagtcctcctgcccgacgccttatggatcatctgacatttccagaacgcagcctcttcattaccggtgcttgtaacgatgaattaaaaatccttttacacgaggcccgcttgtactgcttaatggggctttgcaaggaggcggcggttaattcctgctcgcccaaccgcccagccaccttcgcgggccacgggcaggctgcaggcatggggcactcactcctggttacccatccgtcagtttgtctccaggacttctccagccaccggctcagggctccaggcagtcctggtgagtcagggggctccggctggccgcccgcctgggccaagttatcaccacgttctcaaggccgtgctgctgagaagcttctcacctaccggctgggcaggttcctggcagcaggcaaaagcaccgggagctccctggaggatctgggaggtctgggaggggcttgggatggggggaggcgcctccagggcagcaggaggggtgggcagttgcaccagctctctccactgcccacagtcctgcctggaggggtagggctcggtcaggagggaggggctctctgctcctcaggggttggggttgtttgcgaaagcaggttggtggacagccactgcgcctcagtgtgtgacaggctgaggacacagcttcatgggtggtacctagcggtgaccacctgcttcctccaggccgtggtgctctgcagacctctgaagcccacccgcgtcgtcctcacagccctgtggcctccgaggaaggacaccgagccgggaacttcgaaccaaacaccagtgcctgggcccttccaggccccccacgggccgtagaccctgactccccggcacacactggcctgggccaggccagcactggatgtgggtcttcaaactgcggctcccaggaagggaggtgacggccaagaacgcctgcccgacctcctgtggccacagcgcgtggcgtgactggacctcgccttagtaggggtggctctgggcaacctcggccccaggcacagctcctgacaaatggtcccatgggtccgggggcacgcttttcacaacgtggagatgcagggtcatgggctgcctgctaccacgaggcggaaggggatggtgctgggcaccagcctgccccggggctgggtttctcctgggcctgggccgaggggtggaggcctgtgggtgacgtgttcaagacggctcagcaaccccacctgacagtgtccaggtggggcctctcccccacccccaggctccccagggagcacagcctccactcctacacactggctactctgccggagggggaggccgtgctggagtgatgcctggcgcgtgttgtgtgatgggagaattgggtatttacagtttaataacgagatctcgatgccgtcgatcggccctgctccaggcccttggcttatctggcttttgaacgtggtttatagagtggtgacggtgccgcttattaaatgcttagctgggcctggcgtgggtgtggcggccgccagggccccggtgctggctcgggcaggtgttgcagcgggagcctcaagggatgaaaggtggctctccggtgctccctcctcaccaaggaggcttctctcagggcttcttattaaaagccgatgtaaaggacctgcgcgatggctcacgcctgtaatcccagcactttaggaggtcaaggcgggaggatcccttgagctcaggagtttgagagcagcctggacaatatagcaagactccacctctacaaaagtcaaaaattagccaggcatgatggttgcacctgtggtcccagctactcaggaggctgaggtgggaggattgcttgagcccaggagttggagaccgcagtgagctatgatcgcgccgtgtgctccagcctgggtgacagagcacccaggctcaaaaaaaaaaagaaaaaatccttcactctaaccattctaaagtgtgccactctatgttttttagtacattctgagttgtgccaactatcacaccgtctaattccagaacagttcatcaccccatgaagaatgggccccattaccagtcgctcccatcccctaccctgtgcccacgagcccacttcctgtgtctgggggtggcctgccctgggggttgcagaacacggggtcacatggtctgcactcacctctgtgtccccagggcacatctctgtcgccacgtggttcctctggctgagcgacaccacgtggggctcttcagtgtctgtcccagcagtcagtgacacgcagggggacgggagaggactccccgggggctgatctgtcccagcagccagtgacatgcaggggggatgggagaggactccccagaggctgagcagcaggaggctgggtcagtgggtctggagggcttggccagggaggctgcgggctctgggctgtggaggggaaccctcactgggcagagcgcagggccactcccgcgatgcctcccttgaaggctgtgccgggaggggccggggactccgttccagggtccctagggaagctcgagccccatgcccctgcctgtgtccccatccccagaaatgcgtgtactgccggaagcggatgaagaaggtgtcaggtgcctgtatccagtgctcctacgagcactgctccacgtccttccacgtgacctgcgcccacgccgcaggcgtgctcatggagccggacgactggccctatgtggtctccatcacctgcctcaagcacaagtcggggggtcacgctgtgagtgcctgcccgcctccttgcccccagcccctggctcccgcccccaccgacacccgcgctgaccgccccccacaccctccgcaccctcccaggtccaactcctgagggccgtgtccctaggccaggtggtcatcaccaagaaccgcaacgggctgtactaccgctgtcgcgtcatcggtgccgcctcgcagacctgctacgaagtgaacttcgacgatggctcctacagcgacaacctgtaccctgagagcatcacggtgagctgtggggtggggcagggggcggggggaggctgggagcacagcgacaacctgtaccctgagagcatcacggtgagctgtgggggtgggcggggggaagctaggagtggcctgactccagatcccttcatggggtccccttgtcctcagggccccaggccccttcaggaaaagcaccgctcactgttcagcagaaagcgacccgcagccagggctctgcaccgccccgctaccccgggcccccgcagccagctttggggcttcaggcagagaacctcacttgccagcgcggagagggtctaaaacccagcgacagcccccagcgtagtgtggccaggacctcacctcccacctcttctccctgcagagtagggactgtgtccagctgggacccccttccgagggggagctggtggagctccggtggactgacggcaacctctacaaggccaagttcatctcctccgtcaccagccacatctaccaggtaagcgggggatctggcagccgcgccatgccttcaccaagctcttcttgtaggtgcggggacaggaggatcacacccctggcccaggtgcctttgcctggggcactggcgggtgtgggccatggttagtgaggcccgcaggacccagctgagccttggctcgcctgcctaagttagaagcacagggcttgtttgttttcaaagctaaaggggcctccactcgggtgacatttccctttgagacaccttctcaatttttcttaacataagttctccctttcaccgttttggagtgtacagctcagtacccctgggtttttttttttttaatcaaattggtagtgagtttcttctcatgactgtggaagaggaattatttaaaagtgtggaatcttagaccgggcacggtggctcacccctgtaatcccaacattttgggaggccgaggcaggtggatcacttgaggtcaggagttcaagaccagcctggccaacatggtgaaaccctgtctctactaaaaatacaaaaattagctgggcttagtgacaggcacctgtagtcccagctgctcgggaggctgaggcaggagaatcgcttgaacccgggaggcagagtttgcagtgagccgagatcacaccactgcactccacactccagcctgggtgacagagcgagactcagcctcaaaaaattaattaattaattaaatgaaataaaagcgtggaattttaggaggagagctgcccatatcccagcagctagaagcgtcgctcccaagcctggtgccgcacttcccttgagctcccctggctcgaggctcccgggaggaggcgacagcttgtctcttccagtcacatctgccccatttgaggagtggaaacgaagcctcactcagagtcacctcgggtcacgcggcgggtcagtcggtgacgtcctggccttagctcgcaccccgagccccaagttctttgtaaacatcggagttcagctctttaccacgtcggttaaggtgaaaaccctaacccctgcgatggtcccgaggccgcattaaggaaaggtcccgcccgcatctcccgccagacctgaatgaactgaaatgatcgagtgtcactgagtgcccaggaccacccctaccccccgccgtgcaggccggccccgcccggtcaccactctcggacctgtcactgagcatccaggacccccacccccggccgtgcaggccgaccccgcccagtcaccactctcaacctgtcactgagcatccaggaccgccttgccatgcaggccggccccgcccggtcactgctctcggacctgtcactgagcatccaggaccccccccgctccgccgtgcaggccggccccgcccagtcaccactctcgacctgtcactgagcatccaggacctccttgccatgcaggctggccccacccggtcaccactctcggaccttgcagggtcttccctgctccttgagaagggggtggtttcggggacaagccatccccatggccagccctgtgggagctaccaccaatctccagacactgtcacttctgctcagctccagccttccctggggggaggctcaggcagctccttggacttcctgattgtgttaggcttagaccaagggcaaggtcgatttgcaccccttagcccatcccaggcagcagcaaaagagaataatccctgctcagctcacctggcag[132 bp omitted]gagaccccccccccccccacaatctctacaaaaaattttaaaaattagctgggcatggtagtgtgcgcgtgtagtctcagctactcgggatgctgaggtgggaggatcgcttgaacccaggaggtcgaggatgcagtgagctgtaattgagccactgtactccagcttgggtgacactgagaccctgtctccaaaaaaaaaaaaaaaaaaaaaaacaaaaactctgctgggaagcattctggtgcatctagtacacggcaggatgggtggggtctgtgtgacagtgacaacaccctccgcctgccccgggagcctcagagtctggcccaggcaggtcggactggactccgaggaggggaggttgagccaggacctctagaacaccatggaagtttactccagagatcaggctgagcatgtgccagtctctctccctccctcaagaaacctatggagatgatagaaaacacacaaatagataaatagccatttataacgtacacagagcacaactgtggtggaaaatgacaagggagactcagggtgggtcttgacaacatcccacagaagaggcgctgacgcagcccccaccctggtggcgaaggaagtgctcccaggatcattgtcatgtcaccagagcccaggcagggccagcgtcaggggagctcacctcaaggaagccgagctaatgagacagtcagaaatgagatgatgccagccaggcgcgggggctcatgctgtgatcgcagcactgtgggaggctgaggtgggcagagcgcttgagcacaggggttcgagaccagcctgggcaacgcagcaaaaccctgtctctacaaaaaaacaaaattagctgggcatggtggcacgcacctttagtcccagctacttgggaagctgaggtgggaggatcacttgagcctgggaggttgaggattcagtgatccaagatcgcgccactgcactccaacccgggtgatgaaacaaagccctgtctcaaaaaaaaaaaaaaaaaaaagtcacatttccagagtgctcggggcgggggggcagaggctgtggaatcaggaatgggtggtatcggaagccagcaagccaccgtggagtgcgcgcctgcctgcgaggtggcggcaggacctcgatcacacaatcatgcaaacgcccgctgtgtggtggccaaggagatggggctggagctgcctgccccgaggccaagggcctggtcagcggggcgggtggctggggtgggcccaggtgacagcgaggccgagtggctgagacccccacatgccaaggccccaagagcctccccgcctgtccggaacacttggaacatgtttccctcgcacgtgacccctcgagatgcttctgagacgtgccgggcaagacgtcaccacagggagcccgggccgaggcgcacgcctctgatttcctgtagctgcaagtatatccagttttctcaaaatgttaaaaagcaaacgccgccttcagaactcgccctgtggagactcatagtgaaagcacgttccagggaggccactgggaggaaatcagcctgagtctccagtcagcccccagttcccaaatgacccaggcacagaagtttccctggagcccacttggacccggcagtgtgagcgccatcctcctaggcggttctgtgctcctgagaatctggggcggatctctgcagtcttcctgacccagaaacctgagccagtttccactgagtttctagaacgcgccttcccctcctggcaaggctgcttctgtgcctgactgaatcactgtgtgccacgcctgccagaagccgagaggccgagtcggggccggggagctggggaaaggcagcaggtgggccctgggactcctgcagtgggagctctaaaacccgctgctgcccgtggcaaagcggagcctccaaaacccgctgctgcccttggcaaagcggagcctccaaaacccgctgctgcccgtggcaaagcggagcctggccacgccgggggtggaaatcgctttccggggtgctggggctccgacactaggactccttcacccagactctcctcaccggacagacgctgggaaggggccttctcccggtggctttcctctacaaatgagatgggtaggacggggcagagggtggcacccatgtccttggttcccagcaggctcctccacacatccccgagagatgtgtgctgtcgtcccaggacacggcccagaggcaaccggccatctgagagtccacactgggcactcccagccctgcttctcccgccgcctgcgccggccaagaggcatgtggaacccacagcagacacttgctccagggcctacgtctgtctccatccccacccatccctggaggagtcacagggaccggcaggcttggctgccccaaggcagggtctgtgctcccttggagagggaggtgctgcgatcccgggcccccccgctgcacactacgtggggcgtctagccccagacacacttccgcgatggtcttactgtgtgacttttatacacttccgtcatggtcttagtgtgtgacttttgtacgcttctgtgacagtcttatgtgtgcattttgttcattttgagacggggtcttgatctgtcacccagcctggagtgcagtgacataattagagctcactacagcctccacctcagcctcctgggtagctgggaccacaggcacatgccaccatgcctggcttgttttgagtttttaaatgtgaaaagcgagccctctgatatgggaaccttctccccctggagcagaacggcagtcaggcccagggagtgaccccagcacctttcctggcttgggaacacggcgcccatcgcagttatgaggtgggcctggagacacgcccctccctggcacgcccttcatgggacagtgttgtgttgccagagggcccctgagagagtctccgcgagcctgagctggcaccaagcttaacgaggaggaagcggggtgctcccagtgcccctcaccagtcaggcatctgccacctggaacaaggcaccagctggggaggctggaagggggtgatttttctctgagttgaagggaagaggtgactgagctgttttcagagggccacacataagccagggaccctgtccttcaccttctggttgggggctcctgagctcaggcccctgagtccgcctgtccggcctcccctgcctcccaggccctgttagggcactgcgcctcctgcctggctctgtgtccaccagtgactctgtcaccttgtcctggggctgtgtcttcatggagacagatgtcttttgagctgggaggaggtgaggggtgagtgttctgtctccatgtggaagctgcggggccctgcctctgccccaggctgtcccgtcctccgtcatccttgccccgtggtacgggaccctcagcctgatccttgtttgctgcaggcggtgtcagaggtggacatgagcttcagcttggctgcatgtggcctctagcgggccccatgcacccaagggggctggcctcccagctcttgaggccgtggcctgcctggagcacctgccatcctggcagtgccaggcccctgagagccacatccccctgcaggtggagtttgaggacgggtcccagctgacggtgaagcgtggggacatcttcaccctggaggaggagctgcccaagagggtccgctctcggctggtgagtgcgcgaggctggcctggtggctccgggtgactcagggagcccgtctgggacgaggcagggcacagactgcgtcttccaatggcgtggaccaccccctcctcttgcacctctgctggaagggggtcccggccgccccagcacagctggtccatgggctcctggcaggagacccttcctttgccttgactcctggtgccgcagctcctgggcgatgccgttaatgtggggagggagggttggagaagccccgcccctccccttatcacgaatgcagaacagaccctcccagccccctgtgccctgcaggacccgcgctgccccaccctgcacagggcggcctctgaaccatcacaggttttggggtacaggcgaagtacgggcaccccagttgtcggcttaaaaaagcttttcctgaggtttttccttattaaacgggagcctgagtcctggaggcagcggaggcagctccagctttcgctcccccagccctcatgggcttcctttattctctttctaatcgagaggcgagaggcgaggtgttgaggggcagagcccgtgggggaggttcctggtcctggccacagctgctcagccgcagaggggtccctcggaaaacagatgggagctgccagatggacggtcccagccccagccagggtgcccaccccactagggggccagaggctggggccgagtgcagggcccctctgctggcaggatcaggggtttacaaacacgaaaacaggagcctgctgagcagcccccacagcaatcagggctctgtgtccagccagctcctctcagaggccatagacagtggctggggccgcacagagtgtctccaccgtgctaaccactgtgcttccgctctcccgcagtcactgagcacgggggcaccgcaggagcccgccttctcgggggaggaggccaaggccgccaagcgcccgcgtgtgggcaccccgcttgccacggaggactccgggcggagccaggactacgtggccttcgtggagagcctcctgcaggtgcagggccggcccggagcccccttctaggacagctggccgctcaggcgaccctcagcccggcggggaggccatggcatgccccgggcgttcgcttgctgtgaattcctgtcctcgtgtccccgacccccgagaggccacctccaagccgcgggtgccccctagggcgacaggagccagcgggacgccgcacgcggccccagactcagggagcagggccaggcgggctcgggggccggccaggggagcaccccactcaactactcagaattttaaaccatgtaagctctcttcttctcgaaaaggtgctactgcaatgccctactgagcaacctttgagattgtcacttctgtacataaaccacctttgtgaggctctttctataaatacatattgtttaaaaaaaagcaagaaaaaaaggaaaacaaaggaaaatatccccaaagttgttttctagatttgtggctttaagaaaaacaaaacaaaacaaacacattgtttttctcagaaccaggattctctgagaggtcagagcatctcgctgtttttttgttgttgttttaaaatattatgatttggctacagaccaggcagggaaagagacccggtaattggagggtgagcctcggggggggggcaggacgccccggtttcggcacagcccggtcactcacggcctcgctctcgcctcaccccggctcctgggctttgatggtctggtgccagtgcctgtgcccactctgtgcctgctgggaggaggcccaggctctctggtggccgcccctgtgcacctggccaggggaagcccgggggtctggggcctccctccgtctgcgcccacctttgcagaataaactctctcctggggtttgtctatctttgtttctctcacctgagagaaacgcaggtgttccagaggcttccttgcagacaaagcacccctgcacctcctatggctcaggatgagggaggcccccaggcccttctggttggtagtgagtgtggacagcttcccagctcttcgggtacaaccctgagcaggtcgggggacacagggccgaggcaggccttcggggcccctttcgcctgcttccgggcagggacgaggcctggtgtcctcgctccacccacccacgctgctgtcacctgaggggaatctgcttcttaggagtgggttgagctgatagagaaaaaacggccttcagcccaggctgggaagcgccttctccaggtgcctctccctcaccagctctgcacccctctggggagccttccccaccttagctgtctcctgccccagggagggatggaggagataatttgcttatattaaaaacaaaaaatggctgaggcaggagtttgggaccagcctgggctatatagcaagaccccatcactacaaattttttacaaattagctaggtgtggtggtgcgcacctgtggtcccagctactcgggaggctgtggtgggaggattgcttgagtccaggaggttgaggctgcagtcagctcagattgcaccactgcactccagcctgggcaacagagcgagaccctgtctccaaaaaaaaaaaaaagcaatgtttatattataaaagagtgtcctaacagtccccgggctagagaggactaaggaaaacagagagagtgttacgcaggagcaagcctttcatttccttggtgggggaggggggcggttgccctggagagggccggggtcggggaggttggggggtgtcagccaaaacgtggaggtgtccctctgcacgcagccctcgcccggcgtggcgctgacactgtattcttatgttgtttgaaaatgctatttatattgtaaagaagcgggcgggtgcccctgctgcccttgtcccttgggggtcacacccatcccctggtgggctcctgggcggcctgcgcagatgggccacagaagggcaggccggagctgcacactctccccacgaaggtatctctgtgtcttactctgtgcaaagacgcggcaaaacccagtgccctggtttttccccacccgagatgaaggatacgctgtattttttgcctaatgtccctgcctctaggttcataatgaattaaaggttcatgaacgctgcgaaaccccgttccatgccccggcaagtgtcttcatttctgagcctgtgctagggggactgatgttggggcctccctggggtggggctgcctgcgccccgttctcccgggagaaggtttgcttccagagctggatgtccctcccctcccactctccagggtccccaacacacccccacacacccaggggcagctgtcatgcccctcatgctgtggccaggctgggtggctggggcagcggaccccatgattccccctcagttctctggaggcctggccctggcctcactcgtcccagccagcagctgccctgtccctgtcccccatccggttctggttacatctgagccccgagagcattgcttgtggtggtggtggctggcagacgtgctaggcgctggggctcacggccctggatggccactgggacccagcagtcctggcctgggtcactcagtgcccagccccaccaggcctggagtcggcagaggggacacgggagacctgagcctccctcagggaggtgaccctcctgtgcctggtgtgcggcaagaacatgaagaggcccctgtggctggagcagagggaggcaggggagagggggaggaggggaggcagggtgtgcaggcccttgtgggtctcgggaaggacttgggctttgaccctgagggaggtgggagccatggaggggtgtgggcaggggagggatgggccctgactcaggtgctcacaggcgccctctggtgattgctgtggggaggagacggggtaagggcagaagctagggaccagggcaggggtcaggtgtagtgagaagtgggtggattctggatgcattttcagtgcagagccaataggattcgcagatcacccgagcccctggaaggaggcgttgagctgggagggggttggatttgaacaccagacgtccaggtgaaggtgctgggtctggggaggccgccccaaggcaggtggtcaggggccgtcagctggcaggtgttggaactagaggatgaagtcacctgcagggagtgggtggaggtggggtgggacccaggactgggccctgggtgtctgtggtgggacgggggctgggacacccggagaaacccaggcccagcagccagggctcggggggacgcggccaggccatccctccctgggccccggcgttccctctgcagaaggagtgtccacctgcctgctgtgccgagggcttgtgtcctgaacagagggtgcccttgacaaaaaagcttcatccacctactgcccccagcaccgactctcctttctggggccctctcgcctccagcatcctctcaacaccaccaggactcagttcccctgtgtgctgcaggtggggaggagggatccagggtggggtgaagcccgtggccacaggaggcttggatgctccacctgctgcgatttcccgacaaagactgtgtccctcttttctccatctcgaaagccttccctgtgtgcggggacagacacagcctgaaaccaaagcctctggggtgcccccccgcccgccctaggccctgtgaggtcagcgtccctgggcctccccaagctggcagaggggccgtggcaggagcaggtggtgcctgcagcgtcctttccattgttctccaaaacgctctaaaacgggaaggctatttgggacaggctgttgctgtctgccgagcagagtaaagatgagtggataggtccccaaaagtgtcaccgtgcggagccgatgaggtctgcactcgggccggggtgggtgccccgatgccgaggtctcgtatctcggggcagtgtgtgagactccgtaatcagcacctgagtttggttcatttattccagctgcaatatttttatgcaacctctgtgccaggctctggggacactgctgaggaaaagggagaaaaaaacaaaaatacatctttaatgcatgctctgaaagacaagaacggggtcagagatggagggtaagtggtggtcggtcacagaccaccagaagggtgtcagtggacaccctttttattaaagagggactcttaaacagatatgaccccccgatgggacggcagatcagagaatcaggctgtgggtacattgtgttgagagcaggcaccttctagggcaaggcctggcaacctacagccctccgaccaaatgcagcccgccacctgtttttgtcaataaagttttgttggcacatggacatgcccattcatttacatatgacagctggcgccccgacaacagcagacctgaagagtcactgcagagcccacctggcctgcaaagcccaatgtatttagaatctggccctttatgggaaagaatgtgctcagccctgacttagaagaagtgggtggtggcagcctccaccctttctctatgcctgcaacaaaatgttctcccatagggacagcccctcagtgcccaggtccaccttggctctcaaaggcttccagttagatggacagtgggcagccaactgcccccgctgccacccgcaggagcgggtggaaaaaggaggctttgaccagggactttgattcatctgtccatctgtccgacccactgggggtgctctgccctctacccttgggccacctgctgcccaagtgctggggtcggggagagcctgacacactcagcctccgacccctgcagctgccccccaccaaccccaccattcacggattgggctccctccccttctgcaatggagagttctggctcccactccaccacggtcaagattcacggctcccatgacggtgctaagatcccgatgtgtctccctctctccctgtggccaccgccccgactcctcccacaacctcaaattgtcccctggccccatgaggcagctctggaactcaagagtcacagcctggtcatgatcatcagggagagaagctcccagggactcccagggccccagagacgaggcacagaacacaaggaagctgggggacacgcctggggccttggcaccagcccggggagggttatttacggattagatttactcagcgctgctgctctgttaatggagaatataaaaattatttgctgctgcaggcagtgtgaggggtgacagcagccaggaggcgggcggaagagtgggtggctcagggcatccgtgcctcccagctaactcggtgacagggacaaatgcctcccttccctgcagcttccagacggaggagggggtccttgtggccacgacagcctccacccccaccagccccagcagctgctttagaaacacaaagccagccatgtacggtggctcacgcctataatcccagcactttgggaggctgaggtgggcggatcacctgagttcaggagtttgagaccagcctgggcaacatggagaaaccccgtttctactaaaaatacaaaaaattagccaggcatggtggtgagtgcctgtaatcccagctactcgggaggctgaggcaggagaatcactagaagccaggaggcagaggttgcagtgagccaagcgcgtgccatttcactccagcctggacaacaagagcaagactccatctcaaaaaaaaaaaaaaaaaaaatagaaaaaaagaaacacaaagcccaaagtatgggtgccaaacgggaagtttgaaaagagtctctgtgtcccccaccccttcccagggcccctgctggttccagaacatctgttgccctctcacccccgtactcatcagagtgctgcaaactggggagcttcaacagagaattatcctctcccagccctggaggccagaagtctgagatcaaggtgtcagcagggccacgccccctcccaagagtccagggggatccttccccacctcttccagcttctggtggccccaggtgttcctgggcttgtggccaaatcactgcagtctctgcctctggggttacacacccgtctcctcctcttctccatgtctgctgtgtgtgtctaatataaggacacttgtaatgggacttagggtccacccacatagtccaggatgatctccaaatctcaagatccttaattacatctgcacaggcactcttcaaggaaaaggtcacagcccagggttctggagaagaagatgtggacagatctttttgggggccattagtcaagccaccaccgcaatgtctgtttccccatcacagatcaatagccccatccctaattgcctggtcctgtgactgccacctcccacctcccctgagagggtaaggatatggtcttggtccccaggaagtggcagggggttctgtgagtcctggtgttggtggaagtcaggctctggaaggaccccggaggcgaaggctctggagggaggacccgacggaaggacaggcatgaacttggcatgtggattccccatgggtgggtctgagagccatggaggatgatgtagcaactagtacagatggcccaggacttagcccagggtggtcatggctgtctcccacactcaccaaccgtgatcttatgtccagagttggttccttctggtgggtgcat[136 bp omitted]cccatctctgctaaaaaatacaaaaaaaattagccaggtgtggtggcaggcgcctgtagtcccagctgctcgggaggctgaggcaggagaatggtgtgaacctgggaggtggatcttgcagtaagccgagatcgcaccactgcactccagcctgggcgacagagcaagactgtgtctcaaaaaaaataataaaattaaaaaatgttaaaataagaatgaagccgcggaccttcacagtgagtgttacagctcttaaaggtgtcttggacccaaagagtgaggagcaagatttattgtgaagagcaaaagaacaaagcttccacagcgtggaaggggacccgagtgggttgccgctgctgcctgggctggccaattttttcccttatttgtccctgcccatgtcctgctgattggtccattttacagagtgctgattgatccattttacagagtgctgattggtgcattttacaaacctctagctacagagcgctgattggtgcatttttacagagtgctgattggtgcattttacaaacctcttgtaagacagaaaagttctccaagttcccactcaacccaggaagtccagctgacttcatctctcaatcccccatctaaacaggacaccccaactgctgttgggaattgggcgatgaccgctctagctacttcctgctggataggggcgaagaaggggccctgcagttgtggtgtcctccagaggggaactctttaggccagtgaaagggccagcaggttggtccaggggtcctcagtagaagttgttagttgagctcatttggggttccatttgtaagatcatctgtagcttgatggcctcaatcctagaggaaacaaatttgacaaggaggttaaaaatacagggcctgaaggcaagtaatagcaagatggctgtcacgggacctagaaaggggaaaagccatgtcgcccaattccagaggttgttataagagtttgaaaggcattgtctgatttcagaagccttttcctgtaaacgccaggcggcgtctcctattatccctgactgattagcggaaaaacaatgctcttcccctaagaaggtgcaaaatcctcctttctcagcagtgaggaggtctagaccttgacggttttggagtcactgatgccaaagagtctatttgggattgtagagtaaggatagattttgttatttcttgcaaactgtctgagaaatcctttgagagtgtgtggtagtaggctagtgaagtggacaaacctgctattctgattcctgtagcagtggccattcctaaccctgtaagtaggggtattagttgtatggctctgtgctgatggagttgagctttgaggggcactgatagggtctgatttccacaagattagaagttaggataatacatgttacactgttgttaacttttagcaaactttacttttgttgaaaaccttgtaagtctgggatttcaattattctttgctattaataagacctcgttcagtccatattaacttagaattggtatagatggctccttcctgattctgtaagtactttaaggtttggctgagtgcaaacagctctcacgtttgagcagaccaattattaggcaattttaatacccattgtatctttttcccttaatcaccggagaggaaccatctattgtcctgtcctgaagggagtaccttctaggtctggtcagacctttgtatggtaattaggatttagatcccctattaggaaacctgctgggttaaggatttttgataggaaagctacaggttgtcagtggcctcagtgctttcaggctacgcccctgtttacgctgacaacaaggtggtattggagtgttacagggtcatggagaagacctccaattaacaattgtaggttttaaatttacccaggcttttaaaggcatagggtacactgtttttttctttactacttctatctctttctttctctctttccttctctctttgactttctgtctctctctctctttctctctctctctgactccctctttgtctctgtctcttcctctctttctctctttccttctttctttgactttctgtctttcccctctctctctctctctttctctctttgactttctgtctctctctttctgtctctctctgactccctctttgtctctgtctcttcctctctttctctctttccttctttctttgactttctgtctttcccctctctctctttctttctttctttgactttctgtctctctctctttcctctctgctggtctttccctgcctctccttcccctttttgatagcttcagcagtgtaagactgccacctccttggggtttttgcactgcatgcaatagctccatgatttccttgtggtatttaatgggggttcccccagaggttaggaactccttttctttccatattgcagcatgggcatgtaggattagataaacatactcgctatctgtatacacgttctttttccctttcccagttctaaggctcagataagtgccactagttctgctaactgagcgctggtccttgggggaagaggcttactttcaagtactgttacataactatggcataacctgcccttcatatcccattctccacaagtgaacttccattggtatatggattaaggtcaggattagctaagcggacttctaagagatcctctcaggcggcctaagtctggactataatttgttggcagtcatgcttgattggtttcccatcctctgggagaaaagtggcaggattgaggggtgcacacatgcgtatttgaaggaccattccctcaagtaacacctggtatctaagcaggcggttgtctaatagccataaacttcctttggcacctagtatgccatttacatcatgagtagtctggacagtgagatcctttccttatattattttgatagcttctgatactaagatggccatcgccgcaactacctgtaagcagtgaggccaggcttttgctactacgtcaatttccttaggtacaccactagttgtagggttgtctcacgagtctgagtaatgactccaagagctattcctgctctctgtgtgacgtataaagagaggtttgttcctgtgggaaggcttaaggctggagcttgtagtagggcctgctttaaggttttgaaggctgtttctgcctctggttcccattctactagatgagtatttgccctctgggtctccattctactagatgagtatttgccctctgggtctccttagagtgtatctcgctgtatctggggatccatagtcggcaaaagccagtgattccaaggaacccccacaactgttttaatgtcttagggcgaggataagccagtataggctgtattcattccttgctgagggccctggttcctctggccaagattaggcctagatatttgacttgtaggcagagctgggcctttgatttagacatcttgtacccttgattagctagaaaattcaagagatcgagagtagtctgctggcatgagtcttccaaactggtagccaaaagtaaatcatccacatattgaaggaccagagtgcctggacttaagaagtggcctaaatcttgggccagtacctgaccaaacagatgagggctatccctaaacccttggggcaagaccttccatgtaagttgggacctgtggtctgtgggatcctcaaaagcaaagagaaactgggagtcagagtgcaggggaatacagaagaagacatccttgaggtccagaacagtgaaccattctgcttcctctggtattcaagagagcagggtataggggttgggtacaactggatatagaggaattactgcctcattgattagtctaagatcttgcactagcctccactgaccatttggtttttgtactcctagaattggggtgttgcagggactactgcattttcttagtaagccttgagcttttaaatgtctgacagtatcctgtaatcctttatgagcttcaggccctaagggatattgcctttgataaggaaaattgatgggatcttttagcctgatttggatggggcgggcattttttgcccttccaaattgtccttccaatgcccagacttcagggttgattccctcctcaagtaggggacaacaaatgggtaatttgttccccatattcaagtaaataatagctccagctttggctaatatgtccctccctaataagggtgtgggactttcaggcataacaagaaaggcatgtgaatagagcaaagtctcccaattacaactgaggaggtgggagaaatacctggttacaggctgtcccaggattcctcggatggtaatggaccttgaggacagctgtctggggcaggagattaacactgagaaggctgcaccagtatccaggaggaagtcaatttcctggccctcattggttaatcatacccggggctcagtgagagtgatgacatgagctggcgcttgccccaggcaccctcaatcctgttgttggatcatctggttgggggcttctggcccacagagcctttgccctctggggcagtgcaccttccagtgattgcctcagcatagtggacatgggctagggggcagcttgtttctcattggacaatcttttttaaagtgtccttgcaaaccacactgataacaagccctactaggtgattggcctgttccattttctgtcctctctgaaccaccaaggtttgtttgtctgagggccatgactaaggctgtggccttcctctgatctcgcttttccttttcggcctgtttctcttggtccctattatagaacaccgaggttgcccggtttaacaatgcatccagattttgttcagggcccagggctcacttttggagctttctcctgatatcttcactgattgggtaataaagttatgtttgaggatcagttgaccctcgagagagtcaggtgacaggggagtatattttcttaaggcctcctatagccactcgaggaaggcggtaggattttcttcctttccctgagttgtggtggacatcattgaataattcatggggtttttcctaattctccttagtccttctagaacacaggtcaacagatgtttgcgactccagtccccatgatctgagtcgaggtcccagtggggatccatactggggatggcttgctgaccagtagggaatttgtccctttcttcagctgtcatcctatcatttacttgattaagataaaaggtatctccaaactcttgggctgcagctaaagctccattcttttcattaaagaccagggtttgatctaacaatagcatgacatctctccaagtgaggtcaaaggtttgccctagaccctataggacatctgtatacctatcaggatcatctgaaaacttccccaggtctaccttgatctgctttaaatcgagagggagaagggacatgtacccagattgggccaaaatccctacccctatagcttgaaggggacataaatgatagcccagggggttttgtggtcccttggagatttctttgcttgtttccttctgggtgggggagattagacgaggcttatccttaataggaatgggagctgtaggaaggctaggatatagaggtaagctgagagctcctcctgtgggatgtaaattgcaagctttgcatagttgtggattctccttcaatgaaaagaaagcttggacataaggtatttcactccatttgccttccctcttacagaaaaagtcaagctgcatgatagtattgtaatttatacttccttcaggtggccatttttccccatcagagagagaatattggggcaaggccatagtgcagaaaaaaaaaatgagccacctctttttcagggtttctgggtcaaattggtcccagtggcttaggatgcatttcaaggttgagcctgttgatgcctgagtgtttcccatgtgaaagaaaaactgctcgcagttttggtttgttttcccccctcccccacccaagaacctgcaacagtccctggaccctgctgatcgtaatagttgcgctcaccgaagcagcagcagaaacactagttttcctcctagaccacaaagaggactgaggaaggtcagatttagtggcccttactgatgcattctcggaaacatgcatccttgcctttcctcttagaccacaaagaagactgagaaaaaacagatttagtggcccttaccaacacattctcgaagacctgttagagtcctaagcattttctcctgttagtattgggaccttacccttgttctataaagatgttatgtctcaaaatggagtgaagggccataccctgagggagggaagggatctctagagtgatgccttttgtcctcacttctcatcatgtgaataggaaggatatcatttctgaggctccccatatcctagctttgggaatagcctttgttaggcctgctagtctgaggagggatcctaaaattccagatagtctccccactgacagggctttgggcaaagattgtctttctgattggtgagcccagatgcctaaagaaaggaacagagtcctgaaatgtatactagaagtcgttcttataggagaaactagaaaagcaccagagacagggagtggtttttagaaacaggactagcctcggagaggagaggtgggaggaagtatgtctgacaggcattaggacccaggaggcaagggtcaggatagataggataaatgggcaagtctcgcttgggtgacgtgactttgagagttccgctcatggctgcagggtcaaccaactttttgtcagggccctggagctaaatggctttcctctctgttgacacttggctcagtccggaagtacaggaaaagtggaagctggttccaggcaaaccaacgctcccaactccaaagagttggggattgttagagagccctttcccagaaagcccgacaccagtgtctttagtctggtggccacgctagttgcttttaactggccgacaagtgcccggtgtttagcccctgaattctaaggaaaaataggacagaatagcaagcaaaatgggtccgatggtactcaccaaaaggcgatatcccagacaagcccccaagatgtgtccagagttggttccttccagtgggttcgtggtctcgctgacttcaagaatgaagccgcggaccttcgtggtgagtgttacagctcttaaaggtggcacggacccaaagagtgagcagcagcaagatttattatgaagaccaaaagaacaaagcttccacagcgtggaaggggacccgagcgggttgctgctgctggctggggcggccagcttttattcccttatttgtccctgcccatgtcctgctgattggtccattttacagagtgctgattggtccattttacagagcactgattggtgcattttacaaacctcttgtaagacagaaaagttctccaagtccccgctcgacccaggaagtccagttggcctcacctctcagtcttatcaattctgccagctgctactgagcccttgcactgtgctagtttttcccaagcccacacacacactggggagccagacactgaggatacagcaagttcttgccccacaaagcccatgccctttagaggagacagatgccagcatcaacattaccaggtgttaagaaagtacctgggaatagtctgagtccttcaaaaagttaaacacagaccaggcttggtggctcatgcctataatcccagcactttaggagtccgaggcgggtggatcacctgaggtcaggagttcatgaccagcctggccaacatggtaaaactccatctctactaaaaatacaaaaattagctgggggtggtggtgagctcctgttatcccagctactcgggaggctgaggcaggagaatcaattgaacccaggagggttgcagtgagctgagaccgcaccattgcactccagcctgggcgacaagagtgaaactccatttcaaataaaaagttaaacacagagtcactgtatgacccaggaatctgacttccaggatacaccaaaagaattggaagcagagactcagatgtttgcacaccatggtcatagcaacatgattcacagtggccaaaaggtggaaacaatccaagtgtctgttgtttgatggatgggtaaacacaatgtgatccatccatacaatggaatatcactcagccattaaaaggaatgggggtctgacacaggctacagtagtgtggatgaaccttggcatcatgctcagtgaaagaagccagacacaaaaggccacacagtgtgtgatcccatatctatgaaatgtccaggacaggtcaatctacagagacaggaaggggattgtaggttgccagcagctggggccaggggaatgaggagtggctatttaatgggcatagggtcttctttgggggtatttgggaattaaagagaattggtgactgcacagcactgagtgtgtcaaatgtcactgaattgttcactttcaaatggctaactttatgtgaatctcacctcaatgaaaaagaaatacgggaaggatagacaagaaactaaggatgttggttacctacaggggcaggtgggaaattatttaaaagaattagggcagtaggcaaggtggctcatgcctgtaatctcagcactttaggaggccaaggtgggaggattgcttgaggccaggatttcgagaccagtctaggcaacatagcaggaccctatctctgaaaaaaaaattgtttttaattagccagacgtggtggtgcacacctgtagtcccagctactcaggaagctgaggtagggggatcatttgagcctaggaggtcagggatgcaatgactcgtgattgtgctactgcactccagcctgtgtgacagagccagatcccatctcttaaaaaaaaaaaaaaaaaaaaaaaaggctaggtgcggaagcttatgcctgtaatcccagcactttgggggcca[133 bp omitted]gaggcaggagaatggcgtgaacccgggaggcggagcttgcagtgagccgagatcgcgccactgcactccagcctgggtaacagagggagactctgttgcaaaaaaggaaaagaaaaaaaaaaaagaggctggaagtggtatgggaaaaagagtagcaggaatgaagagggagtgcccactctctgagaaccatttggtatagctctgactgaaaaatcatagtcatgttatacacactttaaaagataactgattaaaatcaaggatatgatgtgtactccaaatggaaaacaaatagtaaaatataaactcagctgcaccacaaatgaaaatcaaccacactgaagagccaggggaagaatggagttgatctcagtaaatttgggaaacaatgtttccactggatactgttaggctaaaaatgaaaatacctatacaccaacactatactctagttcaaaaatctagttctcatggcttagccatctgtacctactatatgtgaatattgcaattgagcaaatgagtgaattaattgtagatgagctaggtttctctctgtcagcgaaaaaagttacgtcaagggtaaaggaagcggctagaatgaacattgtgctggttggaatcagaagtgtcagtataggctgggcgcagtggctcatgcctgtaatcccagcactttgggaggccaaggtgggtggatcatgacgtcaggagatcgagaccatcctggctaacacagtgaaaccctgtctctactaaaaacaaaaaaaaaattagctgggcgtggttgtgggcgcctgtagtcccagctactcgggaggctgaggcaggaaaatggcatgaacccaggaggcagagcttgcagtgagccgagattgcgccactgcactccagcctgggtgacatagcgagactccgtctcaaaaaaaaaaaaaaaaagtgtcagtatcaatccatgattttctaatatatatatatagacagatgttatagaaatatatagtcagtacatatagatgcagaaataaatatgtaagtatatatatttatattatgaatacaggtgaaagggctcaaacttgtaatcccagctatttgggagaccagggtggcttggggagaatcgcttgaggctaggagttcaagaccagcctggacaacatagcacagccccatccctacaaaaagaaaaatgttaagaagaaataaataaagatgtgtgtacacatggctaatctgataccccaatagcagtgagcatactagcaccccgatctaaataccattctccaataaaaggaaccaggggaggaatcactgattttatgactgggacagagaaaacacaagacaaggtacaggcacataccgctgtgcccagctaattttttattttttttgtagagataggggtctcactttgtcgcccaggctggtcttaaagtcctgggctcaagcgatcctcccgccttggcctcccaaagttggccatacccagcctacatgaatgattcgatgggggtctgggctcggtgactcatgcctgtaatgccagcactgtgggaggctgaggtgggcagatcacctgaggtcaggagttcgaaaccagcctggccaacatcgcaaaaacccatctctactaaaaatacaaaaattagctgggcgtggtggtgggcacctgtaatccaagctactcgggaggctgaggcaggagaatcacatgaacccaggaggtgagccgagatcatgccactacactctagcctgagcaatacagcaagactccatctcaacaacaaaaaaaaaaaaaaaaaagagagagagagagagagaaagaaaaacagaaaacacaagataaacctgaagcatcttgtgttcccagaaaataaggaaatgctcaaaaaagggtatagatatatagaaaggacaccagacccaaccgaagcagctcccagtggctgaagctgaaacaatttgaacaataaaattagtgacagtgtgggattatcacctagagaataaaataaatatccaaactgctataagtaattgaataaatacctaaatggagggagaagggacagatcttccttacagatgagtcacattacacgtaagagggagaagtaatggcttagtccctttgtgccactacaagagaatatcatggactgggtaatttacaaagatcatagatttatttctcgtggttctggaggctggaaagtccaagatcaaggctccagcctctggtgaaggctgctctcagcttccagaatgatgtcttgaatgccaccttctcacatgtcagaaggcaggatgggaaaggagtcaaaatctccaggaaaccttttataatggcacgaatcctaaacacctcccccaaaggccccatctcccaacactgttgcattggagaatcagtttccaacacatgactttggggggacccattcagaccatagcaaagagaaaggagtttacattcagtcactcagaaaacaccttcactttcctggtgttatcccaggagcttgggccacactgggcaaatatggggaaaaaaaagaaaaatccctgcccacagcagctcacagcccctcggggagacggatgagataaataaccaaattggggagcaggttagaaggttgtacatgctatgcgataaaagaagaaggaagaagaaggaggaggagagaaaggaggaggaggaaagaagaaaaagaaggaaaaagaagaaagaagaaaactaacggtgatgggaacaactgtattaggttggtgcaaaagtcattgcagcacacaatgacttttgcactaagctaaatatataggttgttcagggtcccactgagaaggtgacatttgagcagagacctgaagggagagagtgagtcaagtgtatatttggaggacgagagctccaggcagagtgcacagcccatgcaaaggtcctggggcaggactgtgcctggtgtgctggaggaacagtgaggagggccctgtggctgcagcagagtgagccaggggaagagaggaaggaggggagggcagcaaggtgatgaacatgtcatgcaaggccttgtggaccttaggctgtgaccctgaggaaggtgggagccatggagggctgtgggcagaggagggacaggacctgactcaggtgctcacaggcgccctctactggctgctgcagggaggacaggctgtgggttggtggcggtggggcagtgaggacgggaacaggtggaccagtgcagagaggactgggctggtgcagggtggaggcagaggagaaga[137 bp omitted]acatggtgaaaccccatctctactaaaaatacaaaaattagccaggcgtggtggtgggcgcctgtaatctcagttacttgggaggctgaggctggagaatcgctggaatccaggaggtggaggttgtagtgagctgagatcgcaccactgcactccagcctgggagacagagttagacctctaactgggaactgacttgttcccagtggctcccagttatgggtgagccacagcaaagccggcttctctgtgcatgttagcatctgcgtgtttctctagaacaatttcctgaagaaacaaaaggggagattgccaaatggaagtatctgtaattttattttgtttatttatttttttttctgagagtctcactttgttgctcaggctggagagcagtagcgtgatcaggagttcctgcagcctcaaccttctgggctcaagcaatcctcccacctcaccctcccaagtaattgagactacaggcagagccaccacacccagctaatttttaaattttttgtacagatggggggtctcactatgttgcccaggctggtcttgaactcctgggctcaagcaatcctctcacctcagcctctcaaagcactgggattacagcacaagccacagtgcctggcctgtaattttacttctaatcctgcagccaggtcaccccaaatgccttgtgcacccccgatgtgtggtaaaggagggtgtgcacttcccgctatctacccagatgtaagctgttaccacgtttttgtgatctgtttgataaatcaaaagtgatatctgattatggcttaaacattcattcctcttagaacgagcgaggttgagtatactctcattggattaaaagccttttgtcagaactgtcttgaaacatactattttttaaattccacgatggccatttcccgtcagtgagagggttgatttgatgtttaatcttttgcgtttctacatccatctagctcagcgtcagttgctgagatctgggtcaggggtcacacccagctttttcttctcttacgtttgatgttgataaatgagaaaaaccaggtcaggtgtgctggctcatgcctggcattccaacggttgaggaagctgaggcgggaggatcacttgaggccaagagtttaagaccagcctgggcaacagagtaagacttcgtctctaccaaaaaatcaaaaagtgagctgggcgtggtggtgggcacctgtagtctcagctactcaggaggctgagataagaggatcacttgagcccaggagtttgaggctgcagtgagctacgatcacaccactgcactccagcctgggcgaaagaatgagaccctgtctttaaaaaaaaaaaaaaaaaaaggcctcatgtcgtggcacatgcctgtaatcccagcactttgggacgccaaagtgggcagatcgcctgaggtcaggggttcaaaaccagcctgaccaacatagtaaaaccctgtctctactaaaaatacaaaattagccgggtgtggtggcacatgcctgtaatcccagctacttgggaggctgaggcaggagaatcgcttgaacctgggaggcagatgttgcagtgagcccagattgcaccactgcaccactgcactccagcctgggcaacaagagtga[225 bp omitted]gaggcaggagaatagcttgaacccaggaggtggaggttgcaatgagccaagatcacgccactgcactccagcctggatgacagagtgagactccgtctccaaaaaaaaagagagtgatggggctcacacctgtaaccccaatacttcacagagctgaggagggaggatcacttgaagtcaggaggttgaggtcagcctgggcagcatagcaagactgtctgtactaaattttttttaattagctgagcgtgatggtgcatgcctgagtcccagctacttgggaggctgaggcgggaggatcgcttgagcccaggagttcaaggctgcagtgagctatgatcacaccactgcactccagcctgggtgacagagcaagatcctgtcttaaaataaataaaataaaaattttctaaatcctgcaaataatcttatcggaagcatttagatcgaatttttaaatatactccacagtgaatcatccatttctgtctccaacaggaaaagaaaatcatgatgaatcagcgaaaggtcacacccttggtgactgagccatttgtgcaaaagcttcattcttttccagaaaccccagtttgtcctcagagttaagactgtcagctccaaagggatggccccaggctgtgctagtaactgaaaacctccccacgacacaagcctgaaataaccgctgtgggtgtgggtggtgttattgatgtcacaaagaaatatcatctcaaaactcatgtttcaaaaatgcttgtgagggctgggtatggtggctcaggcttgtaatcccagcactctgggaggccaagggaggtggatcacttgaggtcaggagtttgagaccagcctgaccaggtcaggagtttgagacccaacatggtgaaaccccatctgtactaaaaatataaaaattagccgggtgtgatggcgcgtgcctgcaatcccacctactcaggaggccgaggcacgagaattgcttgaacctgggaggtgtgggttgcagtgagcaaagattgccccagtgcactccaacctgggcaaca[187 bp omitted]gtggcgggcacctgtagtcccagccactcgggaggctgaggcaggagaatggcgtgaatccaggaggcggagcttgcagtgagccgagattgagccactgcactccagcctgggcgagactccgtctaaaaaacaaacaaacaaacaaaacacgtataagcacctttttccaggaatgccaacatccttccaagggaaaagagcaaagtctcgtcaccacggtccagcttgtcctacagctgatgagggtgatggagctgctgtaatgtctgtcgttttcttcactggaagatgagaagataaatgtgggcggtctttgctgaataaagcagtgtgggatttgtggttcccgagcaaactgtgtttgggtagcaagggccctttctggttgctccccaagctggtcgcctttctggactgaccccacccaccctccccaagttactctgtggcccccaaaacaaagtttttttgttttgtttgagacggaatcgcactcttgtcgcccaagctggagtacagtggcgcgatctcggctcactactacctccgcttcccgggttcaagtgattctcctgcctcagcctcccaagtagctgggactacaggcacccaccaccatacccagttaagttttgtatttttagtacagatggagtttcaccatgttggccaggctggtctcaaactcctgacctcaggcgatccacccgccttggcctcccaaagtgctgggattacaggcatgagccactgtgcccggcacttcttccatctttacctggtggtcattagatgttcaaccctgggggtgttgggagacacccccagagggcaggccagggcctggcctgcagctattattacaggctaagttagcaattgacaattgaggacttactatgtggcagccacaggtccttccttccttccttccttccctccttccgtccctcttttcttttcttttctttctccctctgtcacccaggctggagtgcagtggcacgatcttggctcactgcagcctctgtctcccaggttcaagtgattcttgtgcctcagcctcctgagtagctgagattacaggtgtgtgctaccacacctggctaatttttgtgtttttagtagacaagggatttcaccatgttggccaggctggtcttgaattcctgacctcaagcgatcctcccacctcagcctccccaagtgctgggattacaggcatgagccactgtgcccagcccatctaatttttgtttttgttttttgagacagagtctcactctgtcttgcccaggttagagtgcagtagctcgatcttggctcactgcagcctctgcctcctggattcaagcgattctcctgtctcagcctccagagtagctgggattataggtgcctgccaccacgcctggctaatttttgtatttttagtagagatggggtttcaccatgttggccaggctggtctcaaactcctgatctcaggtgatccaccaacctcagcctcccaaagtgctgggattactggcgtgagccaccgtgcctggcccatctaatatttttttaaatgtttattgagaccttatttacatatcagtcaataaacatatcttcagttgtatggttcaataagtttgacaaatgcatacgctcgcataaccaaaacaagatatagggcacttcactccctccagaatattcccttgtcaaccctccacactcagtggcaactacggatctgttttctccaactatcagtgagaattacatgtttagcacttcatataaatggaattgtgcagaatgtcaccatttgtgtctggcttctttcccttggtgcaatgcatttcagattcaccccaaaacagccatgtttctttcttttttttttttttttttgagacggagtctcactctgttgcccaggctggagtgcagtggtgcaatctcggctcactgcaggctctgcctcctgggttcacaccattctcctgcctcagcctcctaagtagctgggactacaggcacccaccaccacgccctgctaatttttgtattttgggtagagacggg[132 bp omitted]gtcctttttcattgctgtgtagtattccattgtattgatgggccacagtgtgtttatacatttaccagttgatggacatttggcaattgcagttggagcaactgtgaactcattcatgcacacagctctttgtgggtatcttgtgatattttaccctccaatttcactcagtctcatggaactttctcctaccagggacacctatggtaaggtgatttccagcatgggaactttgctaaagaaaggggcaattgggccgggtgtggtggctcacgcctgtaatcccaatactttgggaggctgaggcaggcagatcacgaggttaggagatcgagaccattctagctaacaccatgaaaccccatctccactaaaaatacaaaaaattagctgggcgtggtggtggtggtggtgcatgcctgtaatcctagctactcaggaggctgaggcaggagaatcgcttgaacctgggaggcagacattgcagtgagctgagattgcacaattgccctccagcctgggcgacagagcaagactctgtctcaaaaaaagaaagaaagtggcaatcggccagatgtggtggctcactcttgtaatcccagcactttgggaggcttgtaatcccagcacctggatcgcctgagtccaggagtttgagaccagcctggacaacataatgaaaccccatctctaccaaaaatacaaaacaaacaaacaagaacaaaacaaaacaaaacaaaacaaaaacagccgggcgtggtggctcagcactttgggaggccgaggcgggcggatcacccgaggtcaggatttcaagaccagcctggccaacatggggaaaccccgtctgtactaaaagtgcacaaattagtcaggcgttgtgacacatgcctgtaataccagctactcaggaggctgaagcaggagaattgcttgagcctgggaggcagaggttgcagtgagctgagatcaggccactgcactccagcctaggcaacaagagccagactctgtctcaaaaaaaagaaaaaaaaattagctgggtgtatggcatgggtctgtagtctcagctacttgtgcagctgaggcgagaggatctctttagctcaggaagtcgaggctgcagtgagctgagattgcaccatggcactccagcctgggtgacaaaatgagaccctgaaaacaaaaaagaaaagaaatagagaggaaagaaagaaagaaagaaaggaaagaagaaagaaagaaagaaaaagagaaagagaaagaaagagagagaaagaaaagaaaagaaaagagtggcagtggctgtccttgtacctaatcataggacagaggggagaccagacccagcataggtgagggaagccgtcagggtcattagtggcagctggtgtgtctgaaacagccatggtagggcagcaggatgacccagacaggaccttcggtttatcacaggggacaggagtggaaatcaagagaccctagagggcctggggatcacttgaaaagggtcacaatgatagcatcaggtggggctcatggtccagccctgcccccctggagaaggagcacagggcagcctctgagccccggcctcggcatcagtgcggttgacaccggggccatcaccatctgataataggttctgtttggaacagctgcctggtgacaagtataataaaacgtattaacgaggccattattactccctaattaaaagctaataactaagagttaattgcctttaaaagatgaagcaaggctgggctgggacttatctctgttttcctttgcttgcctggataggctgatatttgggaactaattaattgagtcgaatcttacaggaaactaatatctcctctgccattgcggctgttggattaaaaagcgtttgctgtgtgtctgggcatttctgtggaaaggtctcctgtgtccactgttcttgccggggcgggggtggtggtggtgaggcttcaaggtgcggctatggggggctgcttgtcctctcctttcctgctgattctcccgcaatggtagcccaagcatccatgcaatttgtgagtcagaatgctcagatgctgttccagggaacagacgggccgagcttatatcacagatctatcgtcgtcatcatcatcaccgtcattaaaaaaaaaaatcaggctaggctctgtggctcatgcctgtaatcccagcattttgggaggccaaggcaggtggatcccctgaggtcaagaattccagaccaacctggccaacgtggcaaaaccccctctctactaaaaatacaaaacttaggcaggcatggtggcaggtgcctgtaatcccagctactcaggaggatgaagcttaagaatctcttgaacctgggaggcggaggtggcagtgagctgagataagatggcaccactgcactccggcctggacgacagagctagactccacctcaaaaaacaaaacaaaacaagacagtgctctaactgcaagcatacaattcgatggcttttgtacatataaacacttcagttaccaacactttaacaaaatagaacaagggttagcaaactctggtccctgggccacattcagtccactgcctgattttgtatggcccatagactaaaaatgtttctacgttaaaacaatttttaataatattcaagcttttgctcattctttcatttatgcaattttctttgagatggagtcttgctctgttgcccaggctggagtgcagtgacatgatcatagctcactgtggcctggacctccaaggctcaagcaatcctcccacctcagcttcctgagcagctgggactacaggcaaccccgccctctcctcctgcattcagcttggatgttgcttcctccaggaagccttccatgcctcctgatgcccatctctctgggtgccctaggtgctaaggacggctgcgattatgccactgcactccagcctgagcaacagagtgagacctggtctctaaaaggaagagacatctttctccatgaagcctcaaaggatttcaggcatctttccacacttaactgaaaacctactcccagactgagatttaagcagcctgtgtggactgggaggaaactttaaagagctttacaggacagggcagggaagggctgtcagcagaaggctcagcccaagcgaaggttaggatgccgagcttgtcagagggggtttgaggaggaaccggtgtcggcctgggcccggcccacctggagccctcggcgcagtgaacatcagctgtgctggtcacgttgcctccatcattctgtgcatctgtgcagcgtggccatgtgccagccaagaggacccagagtgtagcaagaacaattagcccatgacggatggcgcctcggtccaccttacttttggcaaggctaattgttgaagtaaagcttccaccggggtcactcgctactgcactgggcggtgtttcccaaaccccgtctccaggaaactgacatggacctgggagttgtgggagggggtcccctgagctggtttgctctcagcactggggtctctgcagagtctcccaggaaaccacctgggcttggcttgggtgtttgttgctgggaaggtttatcatgtataagaccacagacctcagtccatcccctccctccctccctccctcctttccttccttcctccctccctcccttcttccctccctccctccctcccttcttcccttccttccttccttcctacctccctccctcctttccttccttcctttctttcttttttttttttcttcagggtgttgctctgttgcccaggctgtaatgcagtggttccatctcagctcactggagcttcaacctcctgggttcaagcaattttccacctcagcctcccgcgtagctgcaaccacaggcatgcactgtcacaagcagctagctttttacatttttagttgagatatggtcttgctatgtgttgcccaggctggtcttgaactcctgggctcaaatgatccacccgccttcgtctcccaaagtattgggattacgatgtgagccactgtgcccagcttcctgtccttaaaaaaaaaaaaaaaaggcc[141 bp omitted]gtggtgcacgcctgtagtcccagctactcgtgaggctgaggcagaagaatggcatgaacctgagaggc[132 bp omitted]cagacaggatactgtacacgcttcactcagcttcccccgatggttacattttattacatgatcaaaaccaggaaattgatatggatacaatgtattcagttctttttttttttttttcttttttgctcgttctgtcacccaggctggagtgtagtggcgtgatctccactcactgcaacctctgcctccctggttcaagtgattctcctgccccagcctcccaagtagctgggattacaggtgggcgccaccatgcctggctaatttttgtatttttagtaaagacggggtttcaccatgttggccaggatggtctcaatctcttgacctcctgatccacccgcctcagcctcccaaagtgcaatgtatctatttctatgtaattgtatcacatgtatatatatatttttaagagagacagggtcttggggccgggcgcggtggctcacgcctgtaattccagcactttgggaggc[135 bp omitted]gaggcaggagaatggcatgaacccaggaggcggagctggcagtgagccgagatcgcgccactgcagtccagcctgggcgaaggagcaagactccgtctcaaaaaaaaaaaaaaaaaaaaaaaaaagaaagacagggtgtcactgtgtcacccaggctgtagtgcagtggtgtgatcatagctcactgtagcattcaactcctggggtcaagcaatcctcccacctcagtatcctgagtagctgggactacaggcatgcaccaccgtgccttgctgatttttttaatagagagggggttttgctatgttgcgcaatctgatcccaaattcctggcctcaattgatcctcctgcctcagcctcccaaagtgctagcattacaggtgcataccaccacactaggcttattttaaaatttgtctgtagagatggggttttgctatgttgcccagtctgatcccagattcctagcctcaagtgatcctcctgcctcagcttcccaaagtgctaggattacaggtgtgcaccaccacactaggctaatttttaaatttgtctgtagagatggggttttgctatgttgcccaggctggcctccaactactggccccaagtaatcctcctgcctcagcctcccaaggcactgggattacaggcgtgagccaccatgctcggctatcacacataaattcttgtaactaaccacagatgagatacagaactattcggtccccacaaagatctctctaaagctactccctgggagtgacccccaccccattcctaaccctaggcaacccctaatctcttctccagtctacaactttattatttcaagaatattataggacgggtgtggtggctcacacccataatcccagcactttgggaggctgaggcgggtggatcacttgagccccggagttcaagaccagcctggccaacacggtgaaaccgcctctgtactaaaaatataaaaattagccaggcttggtggtgggcgcttgtaatcccagctactggggaggctgaggcaggagaatctcttgaacccaggaggcagaggttgcagtgagtcaagatcgtgccactgcactccagcctgggtgacagagcaaaattccatctcaaaaaaaaaaaggaaagaaaagaaaagaaaattatatatatatgtgattaatggaatccaaacctatgttgcattttgaaattgcctttttttttctgtgaacattaggcccttaggagcagccagggggtatgtgggggtatcagcagttccttcctttttagccctgcgtcgtattccgtggtgtggatggaccacagtttgttcaacgatccacctgttgaagggtacctgggtggagtccaggttttgtctgttgggaataaagctgctatgaacatttgtagacaggtttttgcatagacatacgttcccatttttctaggatgaatgccaggagtgcaattactggacgatgtggaaagtgtttcgggttttaagagttttcccagagtggctataccatgttacatccccaccagcaaaggatgagggatccagtttccctgtacttagaacgtcttttatccccattcaggctcatcctggaagccacacatcccagcgtttgcagaggctcctgggtttcacggagaggtctgggaaggggagaaaaatgcgagcttgtggttctattctaggaaatcgccacaggcttcactctggagttggaaatctcgcctgtggagctcagagccttcataagcttgtgggatccaagatgcctcacgactgccagacagagaatccacacagatcgggcgccagaatttgaagcaacagtcaggctccagcaggattttatcttaaaaaacaaaataggcaattggctgggcgcagtggctcacacctggaatcccagcactttgggaggtcgaggcaggaggattgcttgagcttgggagttcaagaccagcctgagtgacatggcaaatccatgtctctacaaaaaatacagaaaaatgagccgggtgtggtggcgagtgcctgtaatcccagctacttggaaggctgaggcaggaggatcgcttgaacccaggtggtggaggttgcagtgaaccaagattgctccactgcactccagcctgggcaacagagtgaggacctgtctcaaaaacaaaacaaaacaaaacaaaaacaaaaacaattgctttactttatcttattgtcacttccatttcatttaccattgcaactgtgtgcaaatgcttagaatgaacaaagaaattatgaagtgccagggggaaatattgccatatttttcttcccccaaattgcacgctagaacaatcccacacccttccctgccactttgattttgcaccaccaatagtcatgggggacacttttacaagaagaaaaaaataaaaataaaaataagaaggccaggcgcagtggctcatgcctttaattccagcactttgggaggctgaggttggagatcacttgagcccaggaatttgagaccagcctgagcaacatagcaagacttcatctctacaaaaaattacaaaataagccaggcgtgttggcacatgtgtgtagtcccagctactcaggaggctgaggtgggaagattgcttgactccaggaggttgaggctgcagtgagctctgattgcactctgggagacagagcaagaccccgtctccaaaaaaaaggaaaaaaaagaaaaaagaaaagaataaaatgaggctctattagtttccccaagagtctcttttaatccactgctaatcaaatctctctctttttgttttttaactttttgttttggactaattatagacttacaagaagtttcggccgggcgcggtggctcactcctataatcccagcactttgggaggccaaggcgggtggatcacaaggtcaagagattgagaccatcctggctaatacggtgaaacaccgtctctactaaaaatacgaaaaattagccaggtgtggtggtgggcgcctgtagtcccagctacccgggaggctgagg[136 bp omitted]tagatacccttcatccagcctcctctaatggtgacgtcttatatgaccttggggcaatatcaaatccaggaaattgatgttgggataacactgggaaatagacagatatacaaattgtgatattttctaaacctgcattcgtgtgtgtgcacgtgtgtgcaaacctgcattcgtgtgtgtgcacgtgtgtgcaaacctgcatttgtgtgtgtgcacgtgtgtgtaaacctgcattcgtgtgtgcacgtgtgtaaacctgcattcgtgtgtgtgcacgtgtgtgtaaacctgcattcgtgtgtgcacatgtgtgtaaacctgcattcatgtgtgcacgtgtgtgtaaacctgcattcgtgtgtgtgcatgtgtgtgcccagttctatgcagttttattccatgtatagattaatgtaaccatcaccgccatcaagatacagaactgttccatctttacaaagtaactccctcatgctacttttttttttttttttgagatagggtcttgctctgttgcccaggctggagtgcagtggtgcaatctcagctcactgcaaccgccacttcctgggctcaagtgattctccagtctcagcctcccgagtagctgggactacaggcacacaccaccacacctggctaatttttgtagtttttgtagaaacaggttttgccttgttgcccaggctggtctcaaaacactcctgagctcaagcaatccggccacctcagcctctctctccaagtctgggatcacaggcgtgagccactgcacctggtcaccctcatgctacctctttatattcaacatcccacctccacttccctgtcccatcacaaccactaatctgttctctatctctatggttttgccattttgagaacatcatataaataaaatcagagagcatgtactctttgaggttgactgcttttactgtttatgagacagagtcttgctctgtcagccaggctggagtgcagtggtgagatcatagctcgccgtagcctcaacctcccaggttcaagcaatcctcccacctcagcctcttgagtagctgggactacaggcatgcaccaccacgctcagctaattttatttatttattttttttaaagatagagtctccctctgtcgcccaggctggagtgcaatggcacaatctcggctcactacaacctcggcctcccaggttcaagtgattctcctgcctcagcctcctgagtagctgggattacaggtgcgcgtcaccacgcccagctaatttttgtatttttagtagagacagggtttcaccatgttggtcaggctggtctggaactcctgaccttatgatccacccacctcaacctcccaaagtgctggaattttatttgtttatttatttagatggagtcctgctctgtcacccaggctggagtgcagtgccacaatcttggctcactgcaacctctgcctcctgggttcagacgattctcctgcctcagcttcctgagtagctgggactacaggtgcccaccaccacgtccagctaatttttatatttttagtagagagggggtttcaccatgttggccaggctggtcttgaactcccgacctcaggtgacccgcccaccttggcctcgcaaagtgctgggattacaggcatgagccaccacacctggccaaatctttaaaaactttttttgtagagacgggagaatatcgctatgttgcccaggctggtcttgaactcctggccccaagtgatcctcctacctcagcctccccacagggctgggattactggcgtgagccactgtgcctggtctgttttcacttcatcatgctcttgaggtccatccaggtctcaatcttttgtccttttttttttttttttttttgctgagtaatattccaggcatggaatggaggtgctgccatatgttcaaccatccaaccacagaagggcctctggtttccagtattttgctatcatgaataaagctgttatgaatgtgtgtgtactattttttgcatgaacacatgttctcatttctccaggattggtgcctgaattgtattcaattgccgggtggtatgcgaattgcatgttccagctttggagaaactgccagactgtttccacagcggccacgccctcttacatccccaccagcactgcgggagagagccagtttctccacgtcctcaccagcatttggtgttgtcattattttttactgttctaataggtgtgaagtggtgtgtcattctagttttaacttacatttcctaatggctgatgctgttcaacatcttttcatgtatcagatctttctctttaaaaacaaaaaattcattcaggctttccatacaggaaacagtggattattccattacacacacacacacactcacacagacacacacatagacacacacacacattcacacacatacatactcacatatacacacacatacacacacatacacatacacacacacatacacacatacacacacacacagatataattttttttttgagatggagtttcccccttgtcacccaggctggaataaagtggcaccatagctcactgcaacctccacctcccgggttcaagcaattcttctgcctcagcctcccaagtagctgggactacaagcgctggccaccacacctggctaacttttgtgtttttagtagagagagtgtttcaccatgttggccaggctggtctcgaactcctgacctcaggtgatccacctgccttggccttggcctcccacagtgctgggactacagacgtgggccaccgtgcccgccccccacctcttttttttttttttttgagacagggtctctctcagtcacccaggctggagtgcagtggtgcaatcatagctcactgcaacctccacctcctgggctcaagcaatccttccacctcagtctctgaagtagctgggactacaagtgtgcaacactatgcctggctaattttgtttgttatagacacaggggtctcactctgttgtccaggctgattttgaattcctgggttcaagtgatcctcccccagtgctgggattacagatgtgagccaccatacccagcctccaatgcacatcctggtgaatttttacattcatattgtgaggggtgagtgaacggtgggctttgggtggggggtcagaaactccccagcacccctagttcaccctcacagggctgagcttacttctgcaggcagagcaaatcccccaggcggactttgccgtttgcaatcagcagtcattaattagtgtgtttaggtgaacacagctgttgtgatcagggcctctgcagtatccactaatttatttttattttatatttttttgagatggagtctcggtcttgttgcccaggctggagtgcaaaggtgccatctcggctcactgcaacctccacctcctgagttcaagcaattctcctgcctcaacgtcccgagtagctgggattacaggcacccttcaccacgtctagctaatttttgtatttttagtggagatggggtttcaccatgttggccaggctagtctcgaactcctgacctcaggtgatctgcctacttcagccttccaaagtgttgagattataggcgtgagccatggcgcccggctgtatccactaatttaacagtgactgacttattttccagggcgtcccactgttctcaggacacgcccctcaatgtggccctcacagctcatgctgaggtttgaaggtgccccttccaaaattcacatgttgggacttaatggccaatgtgatgggtattaacaggtggagcaggtaggaggtgattggggcctgaggacaccttcctggtgaatgagattaaggccctcataaaagaagcactgagaacggtcggctctttttgcccttccaccctgtgaggacaaagcgttcttcctctccagaggatgcggcaaccaggtcccgtcctgaagcagacctcagccgtcacgagcgactgacctgccggcaccttgatcttggactacctgacatgcagaaccgtaaggaaatcaatttctgttctttataaatgacccagcctgacgcattttattagagccatgaaaatggattgagacaatcctccatctcttgcctctgcctctccgaatttgtttcatgcaatattccccacccccaaattcctcaaatgcaccaagcccccatccatcttgccagcctttctctgggctgcttcccagaaccactttcatccttccttcaggccagctccttcctattcatccttttgaatcttggcttaaacgccacttcctccaggaagcctcccctgcttgctaccttccggtctgagcccctgttccagatcctcacatctccctgggctcgcctttggagaacttctcatggccatatttataaccatgatttgcaggcaatgtagggcttctcttatctgccttgatttgcttaaggccaggggtttgagactggcctaggtaacatggcaagaccccccccccccgccaacccacccaccaccccatctcttcccacggggcagaaaatccagccttgcggtatccgagacactcagcctggagcctggtatacagtaggtgctcaagcagagaaactcaggaggggagtgaagcgcggcctaaatcacgtggctcagcccattgcatatttcctgctgttttccacgtcccccgggggacccactggccctctactcaggacgccaggaattgaaagtaagtgttccctccacaagtttcccccatctacgttcatcttctgcacgggctaattttattaaagttcctcaaagagagaattgtaaattcattagcacgcatgttagaccagaccttcctttacgccgggtagaaaaagattaggagtcagctgagcccgatgataatgaaacagaagatgctaaaacatcattcttaattaaactgtaatgagataagaagttgtcgccggcttgtgggcctggcttgagtcgctcatgttcccatcgtaaatctatgatttatggttctcctccctcacagatgtaattagttttttccccctctaaacaaaaaatcctaaacactacttcgattatatatatgtataaaaagcctggaccacaattggaggttgtttttatctagctggaataataacttcaattaggaaaaaaaataaatgctggaggttgaaagagggagaattcaagaggaggagatgaaggaaagttggggggaagtgcccagttccgtcctggcccagactcttggactctgcccaggtggtgcttctgccaggatagcccttggtcattttagggatctgcggacatttttcactgtggaaaccttccccagatccctgtgtctccctgagcctcatagctggtttgtggcaggttttgtatcatggtagatctcgcagctgcatgcttcaagaatatttggggtctaggctgggtatggtggctcacgcctgttattccaacactttgagaggccagagcaggaaatttgcttaaggccatgggttcgagaccagcctggttaaca[187 bp omitted]gtggcgggcgcctgcagtcccagctactcaggaggc[136 bp omitted]tgcatgcctgcagccccagctactagggaggctgagctggcagaactgcttgagcctggaagttcgaggttgcagtgagctatgattgcaccacgcactccagcctgggcaaccgagcaagaccctgtctgccttcctgttgtctacctctcttccccaagaggaaccaggtgcctgactttggggactccacaatctcggggagggaagctgatgttcatcagataaccacacaccaaaatgagagctatggtagctggacagggtgggaggagagctttggacgaaggcccagaggtgggacagcaaggatgggatgatgggaagctggggagtgaggagttggccttgggaggtcctgggaggtttaaaagtctgttttaaattgagatcatttacatagcataaaaatcaccgctttaaagtggacaattcagtgttgttttagcacaaagcgtgcaaccatcacactatgtaattccacaacgttccagcaccccaaaaagaagccctggctgggcgcggtggctcacacctgtaatcccagcactttgggaggctgaggcgggtggatcacctgaggtaaggagttccagaccagcctggcccacatagtaaaagcccatctctactaaagatacaaaaaattagctgggcgtggtggagggtgcctgtaatcccagctactcgggaggctgaggcaggagaatggcttgaactcaggaggtggaggttgcagtgagccaagattgcactattgcactccagtctgggtgacaggctgagactccgtctcaaaaaaaaaaaagcccatccctatcaacagtcactctccctcccctccccaaccctgtggtcagccacaaatccccttcctgtctctgtggattggcctgtcccggacatttcatggaagtgagatcatacactgtgtggccttttgtgtctggcgccactcactgagtctgaggtcctcaaggtgcatctgtgctgtttcctgtgtcagagcctcattccttttcatggctgaataatattccattttacagatagaccctgttttctttacctattcttgtgttggatgttcggattggtttcacatcgtggctgttaaaaatcacactgctataaac[131 bp omitted]gaaacctcatctctactaaatacaaaaaaaaaaattagccaggcatggtggcaggtgcctgtaatcccagctacttgggaggctgaggcaggagaattgcttgaacccgggaggcggaggttgcagtgagctgagatcacgccactgcactccagcctgggtgacagagcgagattccacattctaccacagtgtagccgcatcattttacctcccgccggctgtggacaaggactcccgtatctgcacacccttaccagcgcttgtgagtgcacgtttttctgtctgtgtttgcttttcgcttggattctagctctcacagtgggtgggaagtgtggggtcgtgcaatagctggttcaccgaaagggatcgcgcttgcgggcggctcaaactggagtgatggtgccagggaggcccggggacaggatgcaatttgcaattccccgtagctctctgtcatcctcctgcccagggtcctatttgagggctcccacagtgggagtgtttcaggaatggggttccgatccagaccctgagagagagggttcttggatctcacacaggaaagaagtcagggcaattccataaagtgaaagcaagtttattaagaatttaaaggaggctgggcgcagtggctcatgcctgtaattccagcactttgggaggccgaggcgggcggatcacctgaggtcaggagttcgagaccagcctggccaacatggcgaaaccccttttctactaaaaatacgaaaattagccgggcatgttggcactcgtctgtaatcccggctactcaggaggctgaggtgggagaatcgcttaaacccaggaggcagagctgatagtgagccgagatcgtgccactgcactccaacctgggcgacagactgagactgtgtctcaaaagacagtaaaggaatgaagaatggctactccatagacagagcagccctgagggctgctgattgcccatttttaggttttttcttgatgatatgctaaacaaggggtggattattcatgcctcccctttttagaccatgtgggtaacttcctggcgttgccatggcatctgtaaactgtcatggtgctggagggagtgtagcagtgaggacacccagaggtcactctcgtggccatcttggttttggtgggatttgaccagcttctttactgccacctgttttatcagcaaggtcttagtgacctgtatcttatgccaacctcttatctcaatctgtaagttagaacatccaacctttggctgggtgcagtggctgatgcctgtaatcccagccctttggggggccgaagcgggcggatcacctgaggtcaggagttcgagaccagcctgaccaacatggaaaaacctcgtctctactgaaaatacaaaacattagcttggcatggtggcacatgcctgtaatcccagatactcaggaggctgaggcaggacaatcgcttgaacctgggaggtggaggttgcagtgagccgagatggcgccattgcactccagcctgggcgacaagagtgaaactctatctcaaaaaaaaaaaagaatgtctaaccgtctgggaatgtcacccagtgggtctcagcctcattttacccaactcctattcaagatggagctgctctggttcacacgcctctgacaggagggaggagggggttaagccggcccagacatctcagagctgggaaacttcagctgggcccccaaacacagcgaggctgcctattcaggggagccattcagccgttgccctgtttgaaaaggccaagcctctgtgtgcaaagcctcaaggcaaagtggcttcgtgccttcctttgtgaggtccagctgctggctctttgtctggggggctgtgggggtgggggcaggcctgccctggcctctcctgaaaccctcccagctgcagccacccctttgtctgccctgattgaaatgcgaagagaaaattagaattccctggccttctctcctcctctttcttctggattttaatgaattcagcccttacaggctgcgcaggtgaagaaaatggctttggagacttttttgttgttgttgaattattttcatttccaggacgatgttcgcgttcaacttcattccgcagaaggttcccctaaagtggtctgggctgctgcttcctgatttctggctggtcggccagagttccaatcagactttttgttttgaatccacaaagagactttctagagctttatctgatctgttctaggaggcagataaccataaataaaattaaatatgaaagaaacaaaattatggtaataaaagtttgcctgcccaaggacttgaactttaagccaattgtcctaatcacagtggtttatgactgtcatcccagccctttgggaggctgaggcaggaggatcacttgagcccaggagatggaggctgcagtgaggcgtgtttgtgccactgtactccagcctgggaaacagagtgagattctgtctctaaaataagttttttttttttttttttttttttttttttgagacggagtttcgctcttgtcaccccggctggagtgcaatggcacgatctcagctcactgcaatctccacctcccgggttcaagcgattctcctgcctcagcctcccaagtagctgggattacaggcacccaccatcatgcctggctaatttttgtatttttagtacagacagggtttcaccatgttggccaggctggtcttgaactcctgacctcagttgatctgcctgcctcggcttcccaaagtgctgggattataggcgtaagccaccacgcccgggctttaaaataagttttaaaaatataaaccgttggccgagcatggtggctcatgcctgtaatctcagcactttggaagggccgaggcaggaatattgcttgagcccaggagtttgagaccagcctgggcaacacagcaagaccgcgtctctttaaaaaaaaaataaaataaaaattatataaactaaccttcagaggagatggcgccttatcaacctgtctgggcttcccaccacattaataaaactggggtggatggtgggaccagtgagtttgtagccatctacactgtcttcaaatggcacactcttgtcgctggtcctcatgtgagctgtggcttcctctagacacagccttgccctgcactccccctcccctaggaagatcttggaatcttattcactgtgcaccttgagaaagccgttcctgatgccctcccaccgatgtacccacaaccactcatgccccacctggtagagctcttggcaccaagaattgaaattgctgaaattgtcttccctgagtctcactcagcaacaaaacccatgtaagcaggaagtatgtctggttcactttttttttttccaagacaaggtctcactctgttgcccagtctggagtgcagtggcacaatcttggctcactgcagcctctgcctcctgggttcaagtgattctcctgcttcagcctcccgagtagctgggactacaggcgcctggcctcatgcctggctaatttttgtattttttagtagagacggggtttcaccatgttggccagggtggcctcaaactactgacctcaggtgatccacccacctcggcctcccaaactgctcagattataggcgtgagccactgtgcctagcctcttgttcactattgaatttccatggccttgtggcttgttgagggtagggaagactctagggccaggaggtccaggttcacatcctggctctgctatttcctggctgtgtgaccttgggcaagttatttaacctctctgtgccagtttactaatctacaaaatggggatgatattatatcagagggctgtgaagtactacgggcagtcactcaataaatggaagctgtttctcataagatagtggcaggaccccgggaaacagcatagttagcaagatatagctctgtctcagtctttcgtttgttttttgggacccaggctggagtgcagtggtgcagtcatagctcactgcagcctcgacctcctgggctcaggagattctcctacttccccgaatagctgggaccacaggcacatgccaccacacctggctaatttttttacagagacagggtcttgctatgttgcccaggctggtctccaactcctgggctcaagtgatcctcccaccttggcctcccaaagtgctgggattccaggcatgagccaccatgtctggcctctgtctcattcttgtggctgcttctctctgcctgtggtaagctgagtctataacagcagagatggatggaagcatgttcctttatgttttgttttatttttatttctttatttttttgagatggagtcttgttctgtcgtcaggttggagtgcggtggcactatctcggctcactgcaatctccacctcctgggttcaagtgattcccctgcctcagcctcccaagtagctgggattacaggtgtgcaccaccatgcctggctaatttttgtatttttagaaaggaggttttgccatgttggccaggctggtctctagctcctgacctcaagtgatctgcctgtcttggcctcccaaagtgctgggattacaggcctgagccactgtgcctggctatgctcctttatttatttattttttttccgagatggagtgcagaggcgtaatctcagctcactgcaacttccgtctcctgggttcaagtgattctcctgtctcagcctcccgagtagctgggattataggcatctgccaccacgcctggctgatttttatattcttagtagagacggggtttcaccgcgttggccaggctggcctcgaactcttgacctcgtgatccgcctgcctcggcctctcaaagtgttgggattacaggcatgagccacagcacctggccctgttcctttattttttaaatttgtttttaatgacacaattacgatataaaagcatttttcataatagaaatggtgccgtaaaaactaaagtttcgttcactcctctttaatcctatgctcactgtggccctctgtgctaattttattttattcattttttaagagacagggtttcgctatgttgctcaggctgtccttgaactcctgggctcaagcgatcctcttgcctcagcctctcgagtagctgggaccacaagtgtgccccaccaaacctggctaatttttagattttttgtagagatggggtctccccatgtttccccaggccgatctgaaactcctgggctcaagcgatactcccacctcggcctcccaaagtactaggattgcaggcgtgagccactacgccctgccccttgcctcagtattgaatttagtggccatggtctgagtaaatccagcccaccactggttttgtaaataaagtattattgaaacacagccatgcccattcactttgtctatggcttttatactttactggcacaggtgaccagatgcaacagagactttttggcctgcagagcttaaaacatttaccatctggttctttacagaaaaagtttgccaacttctgttcaaaagcttcagcattatcaagttaatgtctcaagttgagaaaattcatttcctagtttgctgagtgtttattttaaacatgctttaaaaaaaaatcaaatgctgggctggcacggcggttcatgcctgtaatcccagcacttttggaggccgaggcaggaggatcatttgaggccaggagttcgagaccagtctgcccaacatggtgaaaccctgtctctactaaaaataaaaaagttagccaggcatgttggcaggcaccttataatcccagctgctcgggaggctgaggcaggagaatctctcgaatctgggagctggaggttgcagtgagctgagatcacgccactgtactccagcctgggggacagagtgaaactctgtctcaaaataaataaataaataaaaagaaatgttgccccaaagcattttaaaaattgatttatggtatttttattatggaaaaatatttccacatatttgttataatttgttacatttttattatttattttaataagtgatataatgggcttggcatggtggctcacatctgtaatcccagcactctgggaggccgaggcagggggatcacttgaggtcaggagttcaagaccagcatggtaaatgtggtgaaaccccgtctctactaaacatacaaaaattagctgggcgtggtggtgggcgcctgtagtcccagctacttgggaggccgaagcgggagaattgcttgaacccaggaggtggaggttgcagtgagccgagattgcgcctctgcatccagcctgggcgacagagcgagactccatctgggggaaaaaaaaaaaaaaaaaagataaaatgaacaccatatacttaacacccaaccaaaaaaatcaaacactacacttttttttttttttttttgagcggagcctcactctgtcacccaggctggagtgcagtggcacaatcttggctcactcactgcaagctccgcctcctgggttcacgccattctcctgcctcagcctccctagtagctgggactacaggcgcctgccaccatgcccgccaaatttttttgtatttttagtagagacagggtttcactgtgttagccaggatggtcttgatctcctgacttcgtgatctgccggcctcggcctcccaaagtgcggggattacaggcgtgagccaccgcatccagccaacaatacacattttattgcatttacctatgtaccgtttgctgaatacattctccttcctcctgcacagaaggaacaattaccctgaatttgtttaaaggtgagcttttctctttttttttttttttttgttttttgttttttgttttttggacacagcatcttgcattgtctcccaggctggagtgcagcagcgtgatctcagctcactgcaacctctgcctcctcagttcaatcgattcttgtgtctcccaagtagctgggattacaggcatgtacccgcacacccagctaatttttgtatttttagtagagatgggtttttaccatgttgctcaggctggtattgaactcctgagctcaggtcatctgcctgcctcggctcaccaaagtgctgggattacaggcgtgagccatcacgcccagcctcctaagactttttagcttttagattttacatgtattttgagttactattttgagttattttcatctattttgagttactttttgtatatggtatgaagtatatagtttcatacttcgcatatagatacctaggtggtccagcaacatttgttgaagaagttattctttcctaattaaatggtcttggtacccttgtcaaaaatcaactggccaagactgggatcacacctgcaatcccagcactttgggaggccaaggcaggaggatcacttgaggccaggagttcgagatcagacttggcaacatagcaagatcctgtctctacaaaaaaaaattaaaaactagctgggtgctgctgggtgcggtggctcatgcttgtaatcccagcattttgggaggttgaggcaggcagatcatgaggtcaggagttcgagatcagcctgactaacatggcgaaaccccgtctgtagtaaaactacaaacattggccaggtgtggtggtgcacagctgtaatcctagctactcaggaggctggagcaggagaactgcttgaacccaggaggcggaggttgcagagagcccagatcacatccctgcactccagcctgggagacagagtgagactctgtctcaaaaaaataataatagtaaaataataatacaataaattagctgggtactaattggtggtggtgtggtggtgcatatagctactagggaggctgatgtgggaggattacctgagcctaggatttgacggctgcagtgaactctgattgcaccattacactccagtctgggcaacagagtgagaccctccttttttttaaaaaaaaaagtccattagccatagatgtgtgggcttatttctggattctcaattttattccattgatctgtgtgtctgtccttacaccagtaccacagtgttttaatcattgtagctttgtagtcagttctgaaatggagaaatttgggttttctaatggtatttttttcctgcaaaatgattttgactatatggattctcttgtaattcattatgaatttgtggagtggcttttccatttttgcaaaaaagtctttgggattttgagggggattgcattgaatcatagagtacgtgaggtagtattgccatctagatgagtttttatatctttgctgcttatagtgtttccccctaactaatacgtgtttgctttgtcagttttaaaatgttctgtgatgaaattgcactgtaacttttcttcctgaaatctgcttgttttgctcagaatatttctgagatttgttcaggtcatggtgtatagttttaatggcctcatattcgttgctgtatagtattccatcgtgtgcctgtatcataatttttttctttttctgagatgaagtctcactctgttgcccaggctggagtgcagtggcacgatctcagctcactgcaacctccacctcccgggttcaagcaatattcctgcctcaacttcctgagtagctggcttcacaggcatctgccaccatgcccagctaattttttgtatttttggtagagacggggtttcatcatgttggccaggctggtctcgaactcctgacctcaggtgatccgcccacctgggcctcccaaagtgctgggattatggcgtgagccaccatgcctggcctttttttttttttttttttttcttgagacagggtctcactctgttgcccaggctggagtacagtggcacaatcttggctcactacaacatctgcctcctgggctcaagcaatcctcctacctcagcctcctgagtagctgagattacaggcagataccaccacattcaactaattttaaaacattttttgtagtgatgagttctcactatatgcccaggctgctctccaactattgggctcaagtaatccgccagcctcagccgccgaaaacactgggattacaggcatgagccactgtgcccagactttcataattctttatacattttcctgacggctatttagtttggttccaatattttaacgacaaataatgccactctcgacatatctgtacatgtccccttggacatatctgcaagagtctctgtcagatgtatatctaggaatggaatcgttgactgaaaaagttaggtgcatccttaatttactagatactctcaacttgtcctccaaaagcaccaatctgttctcactcagagtttctaaagtcaaactatccttgcattccataaatctgtctgagtcataacattgtattcttttaatgagatgttagatttccattgctgaaattttcttggcctttttgcatctaggcacataagtggaatgtgcttttttcctccttagtttgtcctcgtacagtttaggtaccatctcttttttcacctcataagctgacagttgacaaaaggtgcaaatcatctcttccttgcggatttggcaaaactcacttggaaaactatctgggaaggtgccttgtatggggcatagatctttactatcacttcactattttctttctctctctctctttttttttttttttttttttttgagaaaggtctctccatcacccaggctagagtacagtggaatgatcacagttcactgcagccttgatttcctgggctcaggtgatttttccacttcagcctgcagagtagctgggactacaggtgtgtgctaccatgcctggctaattttttgtatttttggtagagatggagctttgccatgttgcccaggctgatcttgaactcctgggctcaagtgatccgcccacctcagcccccaaagtgctgggattacaggcatgcaccaccacaccctgctaatgtttgtatttttggtagagatgggatttcacaatgttggccaggctggtcttgaacccctgacctcaggtgatccacctgccccaacctcccaaagtgcttggattataggtgtgagccactgcacccagcttccccatctttttctctcttcactgtctgttcttacaactatcctatggagggagagaaggggattttttgcataccagttctgctaccggtagcctccactgcccctgtctgtttcctccttggctctcccaatactcatcttaccaaaaaaaagaaaaaaaaaaggtttcatctctaaagtgttctatccccacttttctgatattatttgtactttctcttttttattatctttgcctaaggtttttggagttttcaaagaaaaggtttttgatcttgtcaatgcaaaagagc[131 bp omitted]atggtgaaaccccatctctactaaatacaaaaaaaatagccgggcatggtgatgggtgcctgtaatccaaactacctgggaggctgagacaggagaatcactcttacctggcaggtagaggttgcagtgagccgagatccaccattgcaccccagcctgggcaacaagagtgaaactcttgtctcaaaaaaaaaaaaaaaaaaaagttatttccatctttatcttcatttttttttatttggggtttttttttctatttgagtttattttctagtgatttgattgaaaacttggttcatgaactttttaaagttgacttattttcaaaatttcttttcttataagtgtgttaaagaggccaggcacagtggctggtgccggtaatcccagcactttgggaggctgaggtagtaagattgtttaaagccaggagttcaagaccagcctaagcaacaaagtgagaccctcctacctcaaaataaaaaaagggtaaatgtgttcaaggctatgaatttttctctgagcacaccattggctgcatcccgcaggttatgcatttcatgatgtactatttgaattgttcaatttgaaacactttgtaactttcacattgattttttttttttcagaggcagtgtttccctatgttcaccccaaagtgctgggatgataggcatgagtcactgcgcccggattacattgatttaacacataccttatttagaaatgtgttttaaggctgggcacggtggctaacacctgtaattccaacacttcggtgggaggccgaggtgggcgaattacttgaggtcaggagtctgagaccagcctggccaacatggtgaaaccctgtaaccctgtctctactaaaaatacaaaaaaaaaaaaaaattagctgggtgtggtggtgggcgcctgtagtgctacatactcaggaggctgaggcaggagaatcgcttgaacctgggagatggaggttgcagtgagctgagattcagccactccagcctgggcaacagagcgagactctgtcccccacccacctccccgccaaaaaaagtattttaaaatttccctcccccttccaggggaggctaattactcttcagagccaagatcaggatacctcatctaatatttgtttcttggaatttgtgaagatctctgttaatattttttgtttgtttttttgagatgaagtcttgctctgtcacctgggctggggtgtagaggcgcgatctcagctcaccgcaacctccttcctcctgggttcaagcgattctcctgcctcagcccactgagtagctgggattacaagcgtgtgccaccatacccagctaatgttttttatttttagtagagacggggggtttcaccatgttggccaagctggtcttgaactcctgacttcaggtaatcctcctgcctcggcctcccaaagtgctaagattacaggcgtgagccactgcacccagccgatctctgttaattttcacaaatgttccatgtgcgtttgagaatgttagagtaggaggggataatagggtttgttaaatatttttggccaagcttattaatgatgttagtcacatctgtatttttttgactacctgatctgttgcttctttttttttttttttttttttttttttgagacggagtcttgctctgtcacccaggctggagtacagtggtatggtcttggctcactgcaacctctgcctcccaggttcaagggattctcctgcctcagcctcccaagtagctgagaatacaggctcctgccaccatgcccggctagttttttgtacttttagtagagacggtgtttcaccatgttggccaggatggtctccatctcctgacctcgtgatctgcccgcctcagcctcccaaagtgctgggattataggcgtgagccactgcgcccggccttgatctgttggtttctaagagacatagtcctattcttccctgagctgggtccctggtgtcactaagatcaccccttctcattcctggaacttccctgaggtcatagggggctctttcatcctatctctggctcctgtgggtggcttctatgcccaagcaagaagtgactcaggcaagggtatagatacaaaatggctcactctccatccccagggatgtgattctggctcagtgcatggatctgctcattgagtggcctaggggtggagcagagtgtccccaacctgttgcttccctccacggactcagttcttccccagggcacttcgagaaggcagcaccgtgtgatgctcagggctgcgggtgagatgggctggggtacgaatcccagctccacctcaaactcattgtgtgcccctccctgagcctcagtttcctaatatgtaaatggggatttttttttttttttttttttttttggagatgggagtctcattctgtcgcccaggctggagtgcaatggcatgatctcagctcactgcaacctccgcctcctgggttcaagtgattctcctgctccagcctcctgagtagctgagattacaggcaggtgccaccatgcttggctaatttttgtgtttttagcagagacagggttttgccatgtcggctaggctggtctcgaactcccgatctcaggtgatccatctgcctcggcctcccaacgtgttgggattacaggcgtgagccaccgcgcctggccaaggggctggtaacttctatctcagagtgtctggcccatggtgaattctcagtcatggtcacttattagaatgagaacacgaggcagcccctacaggaccagggcttgggttcaaatcttggcctggccacttcatcggtgttttgagttttttttttttttttttttttgagacagtcttactctgtcacccaggttggagtgcaatggcatgatctcagctcactgcaacctctaactcctgggttcaagcgattctcctgcctcagcctcctgagtaactgggattacaggcgcccgccactgcgcctggctaatttttgtatttttagtagagttgagtttcaccatgttggccaggctgggtttcaccatgttggccaggctggtctcaaactcctgaccttgtgatccacccgcctcagcggtgtgtggtcttggacaagcaccaccacctctctgggccaactcctcctctgactgttcacacaaggaaacgagatcagctctccaggaccccaccgacctccaccccagggatgaaactggacaggcaggggcgcaacaaagactccacaatgggccggggtcagacgatcttcctttaatacaaagtcgatatatctacatacacgggggtgggaaaaccacccggctgcttccgctggaataaacagtgttgaaagtaaccgcagacctgcccttgtacaaagaggaacaactcgcttgctcagggtaggcgggtagaggggggcctgtccttctggttttgctcccaaactgccccacagtcccagggggaaagggtccctgatgtggggcagcacagccatacagccactgtccccgaagaagtaggatcctctctgtctccttgggggcgggagacggggagacagctcaggctctcagaggaggaccactgtcatctctctcctcttacagcagcgtccccctcaaccgcacccaacgccactgggtccgagctcccccatgaccttaccctcagaactgtatttgatatgtctgaaaatttaatttataaaaatgaaacaaaaagggggaaaaaaaaagccaagaaagaaaaaaggacatcccattcttctgtgagcaaagcacactttctgatggtaggaaaaattaaaaaaaaaaaaaaaaaaaaaaaagccaaggtacagccatgggcctggcgtgcgcgtttgcgaacgtaactatcacacaaggacgctttctacagtgaaaaaatagactgtctttgaacagaatatgaataagccaaagttagttctctttgaaagtcattgactggcgagtcttttgtttgtttctcttaaaaaaaaaaatggaaaaaaaaatacactatttaaaaaaaatgaaatgtcacgggatacagttacactgagagttttaaaagaaagctggattctggtcccagcccagtgtccccaggctgcagagcggggaggagccccccgggtccccctaccaccgctgggggaggacgaggggtccgtctatggtctgtgccccaccctcctctggttctggggagcactcctatttgctcaccatccccccaccccccaccccggaatctggttttggaattggaaggaaaggaggaatgtgccaagtatttgaaggcggcggccggtgccagggaggtcgctggggcggccggggccggtgggggggctcgaggggctgcgtcgtcctcggaaatggtgcagaaacacagctgctgccgctgccacctcctgccctgcccactgggggtccaggcctcaggaggtccgcccgggaggggcagaggcatccggggccagtggtgtcgggcctggggggaaccatggctttaggttgcatagtggtcaaagcttccgaggtactccagtgccgcctggtaacagaactggtactcatcctgggggagcagaggtgacctgttagtacctccgctgctctaacgcctcccagggctccctatcgccctcaggagcaggccaagctcctcagccttgtgcgtgtctcttgcagaaggtctctttggcccccacggccctcccacaatgaagtgagctatgccacacctctctgcctaacacagccaggctcttcacccggaacgccctctcctcccgtctgcctggaggccctattcatcttttcttttttatttattttgagacggagtctcgctgtgttgcccaggctggagtgcagtggcgccatcttggctccctgcaacctctgtctcctgggttcaagtgattctcctgcctgagcctcccaagtagctgggatgacaggcgtgtaccaccatgcccagctgatttttgtatttttagtagagacagggtttcgccatgttggccaggctggtctcaaactcctgacctcgggtgatctgcctgccttggcctcccaaagtgctgggattacaggcataagccaccacacccagcctcatttctattttttttgtagagatggggtctttctgtgttgcccaggatgggctcaagcgatcctcccacctcagcctcccaaagtgctgggattacaggtgtgagctgccacgccgggtcccctctactcatcttttaagacatggctgctgttcagaaccccctccactggaacattccccttgaagctaggagtctgggcctcagtttccccatctgtacattggttggacttgggggtcagtggttcttggcagggtccaggctgagccacagacttgctgtgacttggggactgcaatgagcccatctctgtccactccaagggccacttctcgcctttgaccttcagctgactgttgtgttaaaagggttactggtccccttccagtgcgggaggggtctgtggaccgtctacccacagtgacccagagagtcccaggtggctgtacccatctcacagaggaggaaactggagcttaggggcagtcggggcgtgaggccaggctgcctcccctccctgtcccatctttacctctgtctgcaccatggccggccgctgggttcgtagcatcttcaccgtctgaaagatgtccaccacgccttcataccgcatccgctccagcacgatgctaagcgtgatgaagacgcccgtcctgcccacgccggcactggtggcagtaaagtgagcacagccattcaggggcaggtgctggggagccctgatctgaccacccgattccccgaggactctaacagcccagatgggacagcctaagcttggggctgtccccaccaggcctcagtttccccagcagggccaaaagctgggacactcgagggagctcacctgcagtggacagagatggggccgtcctggccaaactgctccttagtcttatgcacttggccaatgaagtcgatgaagccctcccccgactttggcacaccctgttccggccagtctgtgaactggaactgccggacagtccgggactggccatcctagagtgcagagagcccaatcttgttatcaggtcagcagcggccatgggggtttttctccatcctccctatcttcacccccattttttgtttgtttgtttgtttttgagatggagtttcactcttgtcgcccaggttggagtgcaatggcgtgatctcggctcactgcaacctccacctccagtgattcaagtaattctcctgcctcagcctcccgattagctgggattacaggcatgagccaccaggcccggccctcacccccattttgtacactctctgccattcatttaccctgacaacttaccgtccttcacaatccaatggtactgctttccataagagatgctccaacctcatcctcaccacttcttgccacccagctgttcctctccccacatttcctgtatgacatccagcacctccatcctccatcctttgccatcccatagtgcaaccagctctgcccttcccagctcctattcaccatgatcctctgtcatcttccactctgtgccatttcggggccctacagcacaactcaactccatcactgtccatagctcatcaatgatgactcatcttctacaacccaatggtgccatcatctttcatcgtccaccatccaacaccatcatcttccaccatccaataacagtgccactgctaccacccactgctggtaactcactaccttctgccgtcccgagttccacccaacaccatcatcttccatcatccaccaccatcccctcttggtaactcatccttaaccattcagtgatggcatcttccactgactgtcttcattccccactactcaaccattcctctttgcagtctcctttcctaccacccagtggtgccatccaaccacatcattctctgccatcttccatccttcacaactcaatggtgccattttccaccatccatcactaacaattcatcactctccaccatccaagggtaccatcttccactgacattctccattccccatcatctgccttgttctaatcccatcctccaccatcaaaatggtgccatccaaaattgttatcctctgccaccatttgccatccaatgtaccatctttccctgatgttttacattttctaaaatctcctttcccaaccccatcttcctcaatcttgtaccacccattggtttataccattgactattgtttactgtcctttcttagtcctagtatttcccattgattttctccaccccctgctggccaaacatttgcccttctccaattctgtcttcctccatccatcactgataaagcatcacccttcactgacccaaactaccacattccactgacattctccatcctgttatgcgaatgttcttctctccaattccagattccacccctccaagggcaccatcttgcactgctcacagcacaatgcccggtgattgctgttcattcagcagccttcaccatcctttggcatcatcttggccaacattccccatcctctatcatcccctcactgcgttctctaccatcgtcgatcttccaccactaactttgatcctttgtcacccaacagggccaccttccactatgagtcttcatctgttgccacctaatacctggcctttctccctccacctgacactgcagtccttcattgagccaacaccatccatactcatctctcctcacccaacggtgccagtccccaccatctgactctccttgtccaccgtctaccacccctcaccctcaatccctcaagtccctttcagccctttaacatcatcctccacaggtggctgcttccagaggaaagccccattcacttccttgaatatcatcccctggggccatgttccctagtgagtggagacactgcagggtcagcacagagataagaccctctcttccacctatgtggcagtagaagcaagtggccaactggtcagctgacacttctcctgattcccaatgcttatgcctaacccttggcctttgtatccatcaccaaccagggcagccctttccagatcactaaggctccagcccctcccgccagtctgtctcttcactcacccgggcatctgtgaccttgaactctcgcaggatatactgaggcatgttgtattctgccatcggatctaccacaaagtactggtagcgggcagagcgctcggccggccagtactggtgacacttctcctgtggaggagatggcggccgtggtcagcgctgtctgagccacagtctggccctcgcccttccctgctgtggcccctagctcacccggcccatctcccgcagcttggtcagcatcaccacgatcgtcgaattgttctcccacagcatgcgccagaagtcttccgtggtctccgccagcggcccctgtgtcgcgatgtaggccttctgctgcctgcaggcgttgggggtatgagcccagggccggcagggagacccggcgtggtactcacctgatgctgcccgggagggtcaggaccaagccagtgacagctacacctaccaccccactgcctgccaggaatggctgctgggtgcaccacttcccctcctggtgatcccattttgcatgtggggaaaccaccagtctcatgacaaattcaaatcccttgacaaagctgcgggactatccactaacctctcctgatttcttccctccatctccttcaagggccactgccctactttcagttgcttgcgtgggccaagctctcagccccgggcctttgcacatgtggcaccctctgccaggaacaccctcccctcctttgccaggatttctcaatctcagtgctattgacatttggcgctggattgttctctgagacaagctgttctgtgtactgtaggatgctgagcagcatgcctggtccccacccaggcagtaccagtagtactcatgaaaataagaaatatcctcagggtgtcagaattaccccaattgagaaccactgatagaacagatggaatcacattatggacagcagccatcagttaaacacacacccaaagattcacggacagcagccatcagttaaatatacatctaaagatgtgtatttaaacagctcagggctaccagtatctccccagctctgtctcccacaagactggaggcctcttgagagtagagatgggctccttctggggccctgaggtgggaaaggcatggcacctacctgtagccatcaatgaagctggcgttgatgtagtcagagccctccacaccccggatgggttgcagacagacccgtgtgctctcatagggcatgatgttcaccaggcggttcttgaacttgttacaaggcagattggcactgatgaagcgtgacgtgtgggccttggagttagccagccgctgtggggaggaggaagccagaggccaccatcaggatgaggaaggctatgctttcagctggagcaccaatggtggataggtaggtaggggcaccctgccaccaccttctagtccccattgctcgaggcgggcctgattttcggctctttgggcctcctccccaccccgcccacagcagcctccaccccgctggcaccttgaactcgagttccatgccagtgacgtgttcgccaggctccacctgggccagcttctggatgtaggcatagaggctgcgtgcgggcacttctgtgttgccacagcccacggcctccagcagggcctcgtggatgaagctgtactggtcctccgtctgcaccatgtagttgcgctgggacctcatgagcgtcacgtggccatagacatcgactgtcttctctggcttgatccgctcaagcatggcgtcgatgacgataaagcagcctgtgcggcccacaccggcactgcagggacagccacgtggcgttcaggggctgctgggctgcggggaccggggggaagcggatggggcagagtggggtggacgtacctgcagtgaaccacgatggggccggcatctggcgggttgcaggtcttgactctccgcaggaaagccaggaagggcgttgggtattcgggcacgccatggtccggccacgccgtaaactggaactggcggacctcgcgtttctcactggagccattctggggaccacaaggatgtcacctgtcactccggctcaacctgccacccatgtgctgaagatgcccaagtggccgggtgtggtggctcatgcctgttatcccagcactttgggaggccgaggtgggcggatcacctgaggtcaggagttcgagaccagcctgaccaacatggagaaacctcgtctcaactaaaaatacaaaattagctaggcatggtggtgcatgcctgtaatctcagctacttgggaggctgaggcaggagaattgcttgaacctgggaggtggagattgcagtgagctgagatggcgccactgtactccagcctgggtgacagagtgaaactccatctcaaaaaaaaaaacacccatgtctgcgcctcccagtcaccatgtccccaagtgcctgacttgggctctagctggccctggacggtttccaagtagagtcttgcggacgcctcacacacaacgtggccaactgtatctggccttctccccaaacctgctcccccgtcttagctgaaggtggctccaaccttctgggcactctggccacagcttgggagtcacccttaactcttcccctctcacatccaacacctcacccgggactgtcggctctgccttcaaagtctatcccaatccacctgctccatgttctccatgcaggccaatctggtctagacctatcaccaccctctttgccgcagaccttggctcccacccaagccccccagtctgtcctccctgcagcagccagagggcacctgagtcagatctggtacctcctctgcccacagccctccatggctcctgcctcccacagggtcaaagccaaagtcttccccaaggcccacaggatcctgcatgaccaggcacggtcctgccccagggcctctgcccaggctgcaccctcttacctgaaatgctgtccccccaaatctccccatcataccctcttccaggtccctaacactgtttttctcctccactttatttttctcctttgacatgtaagctttcttgacatttcatagttgtggtctgtgtcttgtctactagactgttaaatcccccaagggcagaacgttttgtctgtttaggtccctgttgtgtgcttgtgtccaggttagggagtgagatataacatatgcttaatgtataacatatgcttaatgtgtgtgattgaaccaagaattctcactcttgtccatgtactcagttttctggcacttaggtcaagcaggtgcctgacggtgagatgacctggctgggtgttggggatacatcacggtgccagtagcacctcccctccccatcatgacaataacaaatgtctcctggatggcagaattgtcctaattcagaaccacagatggagaaaaacagatggaaccgcactatggacagcagccatcagttaaatacatatctaaaagatcttctccatcccagtcctgactttgcagggctgccaatatctgtccatctctgtctggagactccttgaaggcagggctggggccctgctgaggcccccatcataggctcaagctgggtgaggccagaggacaagtgggcaaagaggacctggggcatgagtaaaggcaagaagaaatcaggctcattgctgagttgggctctgccggctttgttctcctgccgtgggtggaaacaagcagtgtcctctctgagcctcagtttccccctccacggaagtgggttccatgagaatgtagtcagcctgggtagacacgctccgctttctctctgtcccatggggagctccctgggtagaagctggggccctctgcctcccttccaacacattcctccaccctcagcccccagccccagcctgggccccaccttgtgcagagagaatgtcctgacgcagaatgtggccagctcgatggtatctagcaacgtgacctggatgaagccgtaggtctccgtgcctctgttgggccaatactgatcacacttgatctgtatcgggcaagagaacaggtgtcagcagggacaggctgactggcaggggcttgagggccgtggggtccaaggctcacccgtgacttctcctccagccgcgtcatcatgacgatggtcgccgaccgctgctcccacaccatacgccagaagtccccaaaggtctcaggcagcggcccctgcgtggcaatgtacgcgttctgacaccggtagccgtccacgtagttggcattgatgtaatcactgcccatgatgcctgcagccagggcgagaggccagggatctgtgggggctgtcttgctagtttggctctgtgtggccaaccacttcctggaagttcactctgaccgctcccagattgtccccaaggtgaccatgggacgtgtacttcacagtttctccccctcagcgccatcaccatttggggccagatcgccctctgtggcggggccattctgggcactgcagggtgctgagcagcatccctggcctccgcccactccacgccagcaacatttcttcccttcaagttgtgacaaccaaagatgtccctggacattgccagatgtcccctgggcagcaaaactgctctgattggtcacaactgatgcagaaggacagatgaagccatgttagagagagcagccatcagttaaatacatatctaaagatgcccagtggcctccagttggagctggaccaggtctatgaccagaatcaggcctcagtggcccaaggggagacatgggatctagcactttccatgcagtggggaagggcaggttaagacccgggatctccgaactaccttcaatgggctggaggatgacacgggagtggtcataggcgatgacgttggcatagcggttcttcggcttgttcacttccaggttggaatgttcccatgtgaactgctgtccagggtcgatggactacagaggaaggggagagcgcgggtgtcagggtaggtgcctgtgaggccgaggtgatgagggtgggaggcgggggtgggctcacctcatactcctgggagagcttgaggctgtcgttggccttgagccgctccgtgtgctccgccatgtctgcgatgggaattggcgggtggctaagcatgcctacagggtggagcagaccccgccggggttggtcacttggggggccagccggggactcgggggaggggggtgatctacgtgtgagtctgcgatgggtgagctgtggttagaagggcatggccggggtggggcttggcaggaggggaagactcagggtggctcatgaaggggctgggaccccaggcctaggggactctaaaggcagcaggtttgaggccctctgctccgtgcagaggctgacacccctggaggggcctggatcacagcattggcccatcctgtttccttccaaccaagctgggggtgcaggggctggcagaagggtcaccccagaggatgtcaagctcccagtgcctcgagccaagaagcaagtgtgtggcacagaaattaaattgcagacgcagccggctgtgctttggaaatactgtccttgggtgggcgactgacacccctttctgtccctctgggatcagaggcacgaaatccgcttccaggtagaggcgacagactagggaggggaaacagtatgtgtgtgtgtacgtgagaggagtgaggggtccccatctgtccctgcgcttgcttggggcaggagcaggtgcaagaaggccctggcctgagagctcttatcctttcaagccccctaggatggctgccgaaggtgctgggtgtgggctcggttctcccttcccgatatctgggtctgcagaaccctgacctctcctgggacctgtgtaccggatgttcagctctcaggtggtttccagaccagctggtaacatttaatgttctgagacttccatgtgtccctagctgtcctgggtgccccccaagagctcacatctaaggggcctgcctgtcctgtgggcacgtcctgggtacatacgtgcctcacccacatccctgacacacacatacacaccacacacacagcagtcacacacagccacctgagggcccaatggaccaaccccctgccctcttccaggagccagcacaagacaggtgggcaaaggccggtgatgggtgggcgtgtggacagagacaggagacacgatggagaaaccaaagaggaaatgaacgggggcgggggcgaaaggaagccaaaaacagacacaagaactaactttcaaagtgaaaccccggctccctgagggggctcctgaggcctgaatctgcaaacagcaaacaataaataaatgaaaacatgcagggggtaggggggggtcccacctctgcctcccccacccctcactggctggcggatgcaaagggcagagcaacgcggacaacggggggtatgtacagccacctgggcccccacctgaggactcacgatagctgctaactgtgtacccctctggctggacaccagtcaatcctggtcttgacccgtcactctggaaggactccaaagtgctaggttcttctgtctacagatcccctcccccagaccagcctggccttgggtcccctctgttgaggtcagcagagggcattctgaggaaggaggatgcaggatggtgaaggagaagctgggggagcagggaaaggacatatgggcccatgccatgagcttcaaggaggacagcaaccatcagttaaatgcacatgttgaaaatccttatttggatggaaacacaacagacatcagctagtccagagacagaaatgagatgggagcacattagcggtgaattgtgagactctgcatgatcccttcaggagactgcagccgtcagttacatgcacatttaaaattctcatttggctgaaaaaccaaagcaacacgaatcagtacagaggaaagaaagggaagagaatacacgaggggtgatacatgaggccctgcatgatccctttatgaggacagcagccatcagttaaatactaatggtcaaactcctcatttggatgaaaacagaagtgacacaagccagtccagagacaaaaaaaaagaaagtacatcaggaatggcatgtgaggctatgcatgaggctttaaggaggactaaagacatcagtgaaatacaaatgtttaaaatcttcatttggttggaaaatagagttgatatgaaccagttcagagatacgaagtggagaccgggtacagttggaaggacagatgtaacttggctgtgaacccataaggagaatagcagccatcagtaaaatgaaaaattccttatttggttagaagcagctggcatgagcccatgaagagggaggagatggtagagtttgtgaatcatacatgaaaatgatcaaggataaggccttgattcagttctcctggactgtcaggtgactttaatctacagggaactataaagaggcatgaaccctggcagccatggtgggaagaggtacagggcattgggcaggtataatttctgtaccttgctagggatatatcccaagggagtgtggaaaatggctgagggcaaacctcaactcccaccaccgaggaacattaaaaccagagacataaacagaagaatagctctttctgcccaaagaaatgaggggtttatttgtgttttctccattttttaaacatcgtctttaggctcctgaagaggacagcagccattggttaaatgttaactttaaaaaaaaaaaagcctcacttggttgtaagcagaaccaacctatgagttccaagcccagatccatgtagggttggaggtatttgggaatccagaatgtggctgcaccaagcatagttcagagggggccaatgaggggcccccagggtggcagctactgcttctccccagctatctcccctgttggtggcatccctggtaccagggataagtacatacctggagtctggaagttaatgcgtctcatttccacagggtccttggggtggtgaggggcgaggtcggcattgttcaggaggcatttggtgcggggttctgagtccttgcgtttactttaggagaagcaagcggaacagtccagttagtagtggcacatgttcatgtgtgaacacaattcaggccccaggaatgcatggtaagaaaaggaccatggacccgtatgactagggtttccaggaccaagtacagctacgtgtacaagctgtgggggcagccgggcatcccctctcctgtgggcacactatcagcccattccctgtcctcttcctcttgcctgaagcctccacgggggagggctggttcttacctgtcgggtttgctgttcccgaaagcagacacaggtgagaagggggaaaaaaagaagaaaggtgagggtgtgccggccatcaagggcttgttctgtgactctcagtgccttccttaacctctgtgagctttggtctcctctggaaaatggtgctcatatttcctgtttgtccccctgcctatcgacaccacaaggaggcttatctcagccctgggatgtgccccatggggccactacaattgctatcctcattgaactggacacaggcagcctctaccccaaatcttgctgagttgaagataggggttaagaggagaagccaagccactggcctgctttgagccctagctctgccattcccatgctgtgtgaccttgatcaagtggcttaacctctctgaacttcggtttccccatgtgtacaacagagacctttagtgatgattctctgagacaactcctccctccttttccaggaagccctccctgctgtcaagtcaagtcggggaggacatggggcttacttcttgtagagcaggatagcaatgacaatgcagattatgaagaccacggccagcacaggcccgatcacccagataagcccctcctcgccatccacgatgggctgggggtccgggttatccagctggaaggggtctgagaagggactggctgcaaaggtctgcagggaaaggaggggggtctccatcagtgtccaccctccttgtagtggccagatgggtctttctcaaacatgaacctacgtttctcccccgctctagatcctcctatattcctagaaccttgaccctggtggcctatgtgacctggtccctgccaatctttgctctccccattcccttctctgctccagccactctcctttctgtacctccagacctttgcacatgcaaatcctgggatgctttttctttgttgaactcctactcacccctcaacgccccagctccaaggtctcttcctctaagaaaccttcgtttcaggatccctccgctcccaagtcttcccctctgcccagctctgaccacagggagctgcctgtgactgaccacagaggtcagggccctggggaatggggtctgcctcattcagaggtgtgtctggatgtgggcggacaccattcaggacttacaggctcgctcttctgaagcacggcaagcacgaagaggacatagcggtggccgggctccaggccccggttatcgaagccgccatactgcttctggtcgccgggatggaacgtgggtggcagcacagagaagcgagctgcaatatagggccggggcacctccagctgacgcgagtgccgcaggctgcgcctctgtagccgtgagatgtcctggatgagctgcgggaacagagtcatgggtggctcagagctcagctgggagcaacagagcacgtgaaaactggaatgcatctgggccctgcgggttgggccccaggccctcacctcttccagatccatgtcctctgggctacccagcggggtcaggaattggcctccacgagacttgcgcagtggcaccatcacaatgaaatagctcctgtagggagatgggaaagagtcagaggggctgtcgatagggatgaccaagggatgcttcatgggggcaaacgggggaagccgtttctctgagtcttcccttctgttcatacaatgagcctattcccctatgccccatccacaaacgccacagttgctgactcaggcctccaggccttggatgatgctgtactttctgcgtagaaggcttacttcatgtaatgctcattgttaaactcctatacatccttcaaagctccagcttcaatgcccacataaccttgtagcccttaaatcttctctgcctctgaggcagagtgctcctctccccactggggactctcagctttgcctccccactagttgggaagcccagaaccaaatcctttcaggggccctagtaatacccagtggagggtcaggcatatggggtatcaggaaatgctagaagagcagacacaggacacatttagtgacaatgacccatgagaagcattgaatcttggatgaccccatgaactagggctgatagggtctgtgtttcataggcaaggaaattgaggcacagagagggcacgtggcttgccccagccatatagtaggctgatgggggtgacaaggaacccggagcatgggggtgagcatactggacaggcacggggctctggccgtcaggaagatacaccatgatgaagccgtcagcatcaggcttgggggcgacgctgggcttgccgttgagcaggttgaaggcagtccaggcggtgaccgtctgctggaggccgcccaggctgctgccgcgattggtcagcacaaagttgtagaaggtgtggggcttgaggtgcgtgatgagcttcttggtggtacggccatccacatccagtgtgagcccattgtactggatctgcggaccagggctagctcagcagggcctggtgggctcatgcccatggactgagccccagctccaggatgagtcccccaccctgactgagccctgatcccactgaatcctgccctaggcagaaatctaacactgactgatccctgatcccaggctgagtccccaactctgactgagccccaacctcactgaaccctgaccccagactgtgcctaaattccagctgagtcctgatcctaggtagaagcccactttgactgagccctgatcccatgctgaattcccagtcccgactgagccccaatcccactgaaccctgaacccagactgatcctgaattccagctgagcgctgaccctaggtggaaacccacctctgagacctgatcctagactgattcctgatctcagactgaacctcaatcccaggctgacccccgatcccagacttggcaccaactccagactaaactctgacctcaggctaagtaccaactctgagtcccaatcctgattatgcctcagtcccagctaagccatgatctaaggctgagccccaactctgatttccaatatggactaaatcttaatcccagactgaacctcaatcccagctaagccacaatccaaggctgagcccaacattgatccccaatattgactgaacctcagttccagctgatctccaatcctaggctgggccccaagtctgattcccagtattgactaagcctcaatcctagctgagacccatctctgactgagccctgatccctcacttcacaccaactccaaactgagccttaagccctgctgaactacaacccctgaccctgcctgcctgcctgcctgctggctgggcagtcgcaccttgtagggtgtgggtgagttgtagttgtcagggaactcccagctgagcagaactgatgtcttcatgatcattttcaccttgaagttcttgggcgagactgccggggaggcggccgagcagggagagagcagaagagaggccccatgagtgcctggcactgggtggcgtgaagcggggtggggtggggcggcccaggcgctccctgtcgtccgctgtgcccatgcccacggccttcctgcctggccctggcccggccctgccctgtcctgtcccaagtccctgcttcgggagacggcacgggtgcagaggctgcagaaagaaggtggaggaggaggaagaggggggaggggagcaaggggagggggcagtggtggggggcggtggtgccaccgaggcacgtcccacctttgccaacgccggagcctcggggtccggacttgccttgagtgaccacgaggaagcagaaaagtgagcacttacctgggcaggggagagggagggggctggggtgggggtgggcgcaaggcccggtccggctctggtgcaggggtcgccgcgcgcctaccttggtcccgcaggaacgtccggtagcggacgggggggctgaaggggccagggccccggcgcgtgtgggctcgcacttggaggtcataggccgtgtcgggcttcaggccctgcagcgtgagcgcgttctccgcgcccggctcagccgctgccggcagctcagtctctcgggcagggcccagggcaccggcctcccgcacggccaccgtgtatttgacgatggccccgttgcgctcggcgggcacgggtggcagccagcggagaaggacggtcccggccgaggcgttgccggccgcctccagaatctgcgggtggccacggggcgtgtcctccgggatgctcaggacctcggctgcctcctcgcccaggccgccgcggctccgggccgcaagccggaacacatacgtggcccccttgtgcacgcctgatgccgtgtagcggtcctcggagggcgggaactccagggtggccaggggcgtcgagtcctcacggccaaactgcaggcggtagcccagcacctggtcctccgcggtgccagccgggggctcccagcgtgccagcaggctgccctcgggggtctgctgcaccgacagggttgggcggcccagcactgcggggatacggggcaggtgtcagggtcccagcgccatccgccagcccagaggcacaaggtggggttgtatttttaattcttttccttcaatataacatttttttgagttggggggggtcttactctgttgcccagcctggagtgcaatggtgagatcacggctcactgcagcctcgaactcctgggctcaagtgagcttcctgcctcggcctcccaaagtgctaggattataaggccactgcacccagctgcggttgtgattttttttttttttttttttgagacagaatcttgctctgttgcccaggctgaagtgcagtagccccatctcggctcactacaagctctgcctcccgggttcaagggattctcctgcctcagcctcccgagcagctgggattacaggtacacaccaccacgcctgggtaattttgtatttttagtagagatggggtttcgccatattggccaggctggtcttgaactcctgacctcaggtgatccacccgcctcagcctcccaaagtgctgggattacaggtgtgagccaccgtgcccagcctggggttgtgatttttaaaagtggatctcaaggctgggtgtggtggctcacatctgtaagtaatcccagcactttgggaggctgagatgggcagatcatttcaggtcaggagttcgagaccagcctggccaacatggtgaaaccctgtctctactaaaaatacaaaaatgagccgggggtggtggtgcacgcctgtaatcccagctactcaggaggctgtggcaggaaaatcacttgaacccaggaggcagaggttgcagggagccaagatcgtgccactgcactccagcccgggcaacagagcaagactccgtcttaaaaataaaagtaggtctcaagaaagcctcacttaagaagcaaagacttgaaagaagaaagagagggaaccacgagaagatctgggggaatcgtgctccaggaagagggaacggcccatgcaaaggtgtagagccggcactgggctaggggcgcataaagcacagcaaggaagtgaggactcagagaacccctcctccttccattaataaggcaaccatctcctgccttgttgatttggcccttgctcaatgcaggcacctgaccaatacccatgggacataaagaaatccaaaatccgcccctgctctttgtttcgcacagcctgggtagtaatcaatgtgccgagagaggttctgggatcaggcaaagaagggggaaagctgggctgtatacatgaaaatggacttctctactgcaggacttatcagggccttgaatggactgctatgaatacccagggtggtggggagagcagcgtatgcagtggtttctgcttagcaaacacagctctaatacaatgtccctgagagaggagggaagtgccctgctggctagaagaagggagggagagatcacaggaggctgcttggaggaggtggcgttagagctggatgctggaggacgcagacaaggtgcgtgaagggaatagtgtggacaagggcaggggctgtgtccagctgggaggcctgaaaggtggggtacacagtggtgtggctacaagggtccccgaggagagggtgggtgtggggactgggatgaaggccacagaagtcagtcgattgttcctgaaacacccgagcttgttccgcccaccaccaccaccaccacgccccaccccccaagtctttttctgggctgtgccctccgcccggtgtaccctccccttacatcttcacggcagcctctttttcttaattcagctccattttggctggaaaaaaaagccagccccttggggacgatggaagggacaatggaggggctagaaggggaaactgaggcagggccaccaagagaaaggtggcttcctggtgcagtaggggaagacaggtgcaccaccctgaaataacaacctagccggggcgaccagagcctggatgggggaagcacaggagactagggggcccagaaggatcaagattatgggatgaggcaatcagggaaggctttccagggccaggtgtaccttgagctgagacctaaaggcagaagaggagccagccagcaggggaaggggtatcctggcagagggaacagcccaagtaaaggttgagagggcaaaggggtcagaggtggctgttaactgtttctgtctggtgggagccggggggacaggaagtgagtgacaaaggaggaggcaggggcggggggggccaagctgggccctggacacccacctgagcagccctcacacctttgtctcactgttccagctgcctggtgcaccctctgcctgcccttgtgagctcaaggactctggagtcacgctctggtgccagtgggggcaaaggggctgttggtgggtgggaggagggcgggttgcatacctgctcccttggtcacaaccaccttgggtttgctgcgagcgccatcgcccttcatggtgtaggcggctaccgtgatggagtacgcggtctcaggctgcaagtttgtgatgaccatctcctgcaggcacggctgggggtcagcacgacggctggggctgggagcagccccacccacccccactccccgtgctgagaacaagcaaggaggatgcagggcccggatcaggggtggagacgtgcacatgagctcatgcagagaccacgacacgtggcatggccatgctcagagggtacatgcaacaacccagccggacgagcccattgtcgcttgccaggaccaactcggtcctctctgctccgctcccctcactccttgccatcacccccgacagtctgtcctccccacagcagccagagggcgcctgtgagcactggagtcagggtccgtccccgctctccccacagccctccatggctcccacctctcttggggtcaaagcccaagtcttccctgtggctcacaaagggctctccttgctgttcctccaatgcaccaggcacagcctgcctcaggccctttggcactggccttcccccctgtctacacccactggtgtgctggaggtgcccggtaccaactcatgagagccgctggttaaattttcaggaattttgtgagccacttatgaaacagagctgttattaaaaattaaactgtacgaggctgggcgcagtggctgacgcctgtaatcccagcactttgggaggccaaggcaggaggatcacttaaggtcaggagttccagaccagcctggccaacatggtgaaacttcgtctctactaaaaataccaaaaaaaaaaaaaaaaagcaaaaaagccaggcgtggtggcacatgcctgtagtcccagctactggggtggctgaggcaggaggatcacttgaacccaggaggcggaggttgcagtgagccaacatcgtggcactgtactccagcctgggtgacagagcaagactgtctcaaaaataaataaataaactgtataaacttacaatcaactaagttatattgaaagcaaaggcaataaatacagcaaatctagttatttcactagggttactgttctctgtgggtatctgtatggttactgctttgagatcatcttgtctattgcatctgtagagtaggaatacatgattatgggctactgggcacctccccggtagcttgaaattgacatggtgggaagtatttacaccatggaaacggtccaatgctacaaaacaggactgccccctcctgcccacccagagagctgatttttactcttttatcttattgagacagggtctcaccctgtcgcccaggctggagtgcagggtgtaatcatagctcactgcagccttgacctcctgagctcaagtgatcctcccgccttagcctcccaagtagctgggaatacagacgtgcaccaccacatgcctggctaatgatgtttatattttttgtagagatgggatcttgccat[136 bp omitted]ccatccccaccacagctgtaacaatttttttttttttttttggacatagagtttcgctcttgttgcccaggctggagtgcaatggcatggtctcagctcactgcaacctctgcctccctagttcaagcaattctcctgcctcagcctcccgagtagctaggattacaggcatgcgccaccacgcctggttttgtatttttagtagagacagggtttcaccat[138 bp omitted]atgactgttagggaggaggggctcttgtcaccaccacatcctcagcatctagcacatagtaggtgctcaataagtgagtgctcgtccaatgaatgacagcacagaacactcccgggcacgcggacttgcacaacacctgtgcacacgatcacagcatcatgtgtgcccatgtctgcaagcacacacgcacccccccaagcacaggccggcatgcctgggaactgtggggtagacccaggccaaggggataaggaggggtgacggggatgcacaaacagggtctcctacccctgagcctcacagtccatccctcccagggtctctgcgagaagagcagagttgaagcccaggtgggaacattccctctagatccagtgtgggtgagagatgggaggcatcagagcatgtgggaccagtgcctgtttgtttgtttattagagacaggatcagccaggaccagtggctcatgcctgtaatcccagccactcgggaggctgagacaggagaattgtttgaacccaggaggtggaggttgcagtgagccgagatggcgccactgtactccagcccgggcgatagtgtgagactccgtctggagaaaaaaaaaaaaaaaagagacagggtctccctctgctgaccaggctggaccgcagtggtgccattttggctcactgcaacctctgcctcccaggttcaaacgattctcctgcctcagcctcccgagtagctggaattacaggtgcctgccaccacaccaggctgtttcgtattattagtagagaaggggttttgccctgttggccaggctggtcttgaactcctgacctcaggtgagccacctgcctcaacctcccaaagtgctgggactacaggcatgagccaccacgcccagccaagggaccagtgccaatttaatgtcagacctggggttctcagcagagactggtactcccgttttaggggcagagaggtagtccagagagaggtagcaacttgccccaagtcacacagcaattcctctctggtttaaagcattgtggggttgtaaccaggctatcacagacatccttccccactctggccccgctgacacctctcatcacccgggggccagaatgaagacgacagcatatccagagagaggcatttctaggccagacagggctgaattgagtgacagtaaagggtggggctgggtcaacaggagaggagacatactcacaggagaaatgactacgggcaggagaaggacccaggaggcttaagccccaccaatggcaggagccatcagggtgagaggattcagggacgaccctcaggtcctgttgctcaagccaccctcgggtctgccccctggggcgcacagtggtccgagtatcccatttccctggtgcaaacatcgaggctgggcgctccaagaggtaatgggagagcgaggggcgcatgggagggcccagaggaggagaccgttttactactgatgataaggggcgtgcaggagtcacagcacagcacggcccgcgggaagcgcacagcagtaggtgggtggccaggggcgctacttacatattcggccgtgtcatccgtctcccactgagcgcgggaggaggcggcaggggagagaggaggaaggtgagcgggggaggccagagatggagaaagagaagcagaggtggggggagcgcaagggcccgtccccgcccggagcccgtccccggccccgccccggccccccgcccacctgggcatcggccagcatgacgtccttgatgcgcggcggcccgcgggcctcggcgccctccatgcgcacgtagtggacctggtagccgcggatctggccgtgctgccggccgggcgcgggcgagcgccacagcacgcggatggccgtggcgttgagcgcctccgcctccaccttccgcggcggcgcgctgggcactggcgggcgggaggggaggggaggggcgggcggagccgttaccagggcgcccggccctgccccgggcagtgccactgtccgattccaggatgccgagtggctgccggtgaataactgggcgctcttagcgctcaccaccgggcgggaggacatggcctcctgcacaccccccacagccctgggaggggcccctgaaggtgcgccccatggatccaggctgcccccccccgagtctaaaccaccttcccagggcctccagacaccctcttcttcaccctacactgcttccatcctcatcataaccctgcaagatagggtctcctgtcattctcattttacatttggggaaattgaatcctagagagttgattctgtgatcacagccttagcaagaggcaaagccaggatttgcaccaggcagtccagctgtatgttcctaaatacccaagcaggcaggtggcccacttggcactcaggatctttttcacccaccccagggtttggcataaagaagagctgcttcatttcttctctgggcttaggacataatggggctgtccaacgaaacaaaggcaaatggctcagaaaacgaatcaggttcccaggaccaagaggctgaaatatttttgagacaggttctcttactctgtcacctaggctggcatgcagtggcaggatcacggctcactgcagctttgaactcctgggcttaagcgatcctcccacctcagcctcccaagtagctgcaactacaggcctgtgccaccatgctcagctaatacgtttttgtagagatggggtctcactctgtcacccaggctggagtgcaggggtatgatcacagctcattgcagcctcaaactgctatgcccagcaatccccgcacctcagcgtcttgagtagctgagactacatgtgcatgccaccatgcttggctatgttttaaaaatgtttttggaggaatggggtctcactatgttgcctaggctggtctcaaactccgagactcatatgatcctcctgccttggcctctcagagtgctgggattacaggcatgagccactgtgcttggccaagaagttgcaattttattgggaaaggtgtctgtcatttctctccatgatctaggcttcgaccacgtgactccaagctaggaccactgccttgctttccagcttcaaacttgctgctaacttgaaatgggtgaggacgggaacatttacaccatggaaattggccaatgctacacaaactggtctccatccacccggggagctggttaaccatgatcagcacattgttgttgcaggtgctatttgccacttcctccaccccatttccaaaggtttccactgttccaccaaaatagagggcagccagcgaaactgtccaggcacgaggctctgggagcagatgctgcagagctaagcctgcccatgtctagaatcgccaattccaaagtcaaggagccccggatttctcggggaggctgcttgcttcccgacttcctccgagtgaggcttccgccctttgaccaccagcccaggtttccagatggaaggcttcgaggcgggggccgggctggggcctgcggggggtcccgggcctggggcaggtacttaccatcctcgtcggtgcggacgaccacgggcgagctctcgggccctggtcccacctctgtgtgagcgacagtcgtgatgcggtactgggtccacttctccaaggcctccagcaggatctgagtggtggtcggggggatgccgttcacctccttgggttccgggtcctctgagcccagcggtcggtagcggacgctgtagcccaccagggccccgttgtgcgtttccggcggcggcgggcgccaacttaccaaaatggccgtggagcgcacgctgacacatttaacgtcttgagggggggctgacggttctattggagggggggagaacgtgggggggtggggaagggaggtgggatgggtggggaggggggcggggaaacaaaagatgggaaagagaaaataaaaaagaagatgataacaaacaaaacagaaccaaaccaaagagaagtcgaacccaaaagaagtgggtgtcaaccaaaggtgggatgggcgggtggatgggcgggcaggtgggatggggctgggagggctggccaagaaccctgtgctcaccaggctgcacctacgtggtgcacagtaggtcttaggcattggacagctatggtccccatgccagaaactgggtgggggaatagcaagggaagcccttcttactaggcacctactatgtgcttggcatcgtgccaaggggaatagcaacaggagctccatttattaggcacctactatgtgccagcaccaagggcttcacaaaatagtaaaagcatctatttgttgaacatctactatgtgccaggcaccatgccaaagggaacggcaacagaagctccacttattaggtacctactatgtgccagcaccaagggcttcacaaaataatagtaaaatatctatttactgaacacctactatgtgccaggcaccatgccaaggggaacagcaatagaagctccatttattaaaggcttattatgtgccaggtactgtgccaagggaaacagcaacagaagctccatttattaggcacctattatgtgccaggcaccataccaaggggaatggcagcagaagctctgtttattaggcacctcctatgtgccagcaacaagggcttcacaaatagtaaagcatctatttactcaacacctactatgtaccaggcaccatgccaaggggaacagcaatagaagctccatttattaagcacttattatgcgccaggtaccgtgccaaggggaacagcaacagaagctccatttattaggcacctactatgtgccaccataccaaggggaatggcaacagaagctccattcattaagcacctactatgtgccaggcatcatgccaaggggaatggcaacagaagccccattaggcacctactgtgtgccaggcaccatgccaaggggaatagccatagaagctccaattattaggcacctactaataattgtggtaaggcattgtgctgaggactccatagaatgatagcaaaataatctatatgtcaaacacttactatgtgccaggcaccgtggcaaggggaacagcaacagagctctattaagcacctacgatgtgccagcgccaagggcttcacaaaataacagtaaaagcatccatttattgaacacctagtatgtgcctggcgccatgccaaggggagcggcaacagaagctccatttattaagcacctactatatgccaggcaccacgccaagggaagcagcaacaaaagctccaattattgggtacctagtatgtgccaggaaccatgccaaggggaatggcaacagaagctccaattatcaggcacctactacgtgtcaagcattgtgctaaggcttcatagaatggtaacaaaataatctatgtcgaacacctatgtgccaggcaccgtggcaaggggaacagcaacagagctctattagacacctactatgtgccagcgccaagcacttcacgaaataatagtaaaagcatctatttattgaacacctactatgtgccaggtaccatgccaaggggaatggcaatagaagctccattaagcacctactacgtgccaggtaccatgccaaagggaacagcaacagaagctccatttattaactacctactatgtgccaggcactgtgccaaggggaatggcaacagaagctccattaggcacctactatgtgccagcaccaagggcttcacaaaataatagagcatctatttactgaatatctagtatgtgccacgcatcatgctaaggggaacagcaatagaagctccacttatcaggtacctactgtgtgtcaagcattgtgccaagg[131 bp omitted]tgaaactccgtctctactacaagatacaaaaaactagccgggcatggtggcgggagcctgtaatcccagctactcgggaggctgaggcaggagaatcacttgaacctgggaggcggaagttgcagtgagccaagatcgtgccactgtactccagcctgggcaacagggcaagactccatctccaaaaaaaaaaaaaaaaaaaaaaaaaaaaaaatctatatgtcacacactatgtgccaggcaacagcaatagaagccccaattattagctacctaccatgtgccaggtgtcatgccaagggcttcatacaataacagcaaatgcacttatttactggccacctactgtaggtcaggcatggtgccaagggcttcataataatttacggaaaatatggtaaaatttttcttgtagtaaaagcatttatttactgaacacttgtgctaccagggacccaaagcccatcccaaaagcttacttcaactaggaccatccaattggcctcacttgaaaataatgcccatgtcttgagcacctactgtgtgccagatagaatgtcaagggctttatcaagtaataataaaagtgcctgtttattggacacctactggtgtcaggtaccaggctcaggacttcatagctcatattgagcacctactgtgtgccaaaatctttaaagatcacagcacttctgtgttcagtcccaactatgcacctggcaccacactacatctactactaacctatcaacagcaagtctcatttattgaacatctactatggactgggtacggtaacaggtctctgaagagaaaaacagcagttgtcatttaagcagcacctactatgtgccaggcactgtgccaaaggctctctcagaaaacagtagtagtccctgcatattaaacccctactgcgtgccaggcactgtgctaagggctgtatcagaaaagttaatagtccccatgtattaggcccctactgtgtgccaggcactgtgttaaaggcttcatcagaaaacgatagtagtcaccacatattaagcacctattgtgtgccaggtgctgtgctggggcttactgaaaaacagtaagtttccacatatgaagcacctactatgtgtcaggcaactctactaagggccttacggaatgtta[137 bp omitted]gcctcccgagtagctgggactacaggcgcccgccaccac[172 bp omitted]gtgccaagcatcgtgctaagggctttattggataactgtaacagcacctggcaccgtgtgccaggcattgcactcaataccttatataaaaatagtaatagttcttattgagcacctactatttgcacacactgtgccaagggctttgcagataataagtgaatgttttcagtaaaaactgtgtaaccagccctatcccacaccctttcaaactgataatggtgcccatctgagcatctactacgtgcctcacacttaggccacctctttatagcaagtgccacttattgagcacttactgtatgtcagccattgtgccaagaggtttgcagaacaataattgttgccacccatgttttgagtacctactgtgcgcctggcactaggctaagcttgttataaactgctaatagcttccatttactgagtgccaactaggtgcccagcactgtgccaatccatatgtagatttaaaacagtggctgtattaatggggcacctactgtgtgccaggcagtatgttaaggtctttgctgaataacactgagagttcccgcatattaaagggaactgtctgtgtgttaaaggcttatgaatcagtaagtctctatgtgttgcgtgcctactatggccagacgctgtgctgagggcattagtgataataaacttcattttctgcacgcctactgcaggtgcagcaccctcagcccatgtttcatgtattatctcatttaacgcatgtatcatctcatttaatgcatgcattatctcatttaattctcacaacccctcaggtggtcagaactgtcactccccacccgccaccccgcgtcaacggtggggaaaccagattccaaagtctgcctgctgggctttctacagtcactggttgtgtaccgactgtggccagaccccaccctggaagcttttcattattttgtataacacctctcaatcttgccgaaaaaccagaagtgcagcccattttacaggtgagcccattttacaggtgaggaaactgaggctcagaaacagcaagctacctgtccaggggcatgcagtgatgaggtggcagagccaggattggaacccagacttggccgtgattcacaggctggcttggtttgaggttggcagctcagatctcagccttgtgctggttgggtatggcggaagccactctcccaagtgcccacgattttagaatctacgtcccctggagggaggcccagagagattactggccttgctcgtggcaagagcattagaaaccctcaccatcagagcagcttgcttggtggctgagcacatgtttactgagtacttactatggacactatcctgctagcatctgaaacccagagacgaatcctgtcctcagagacactgggctaccagagactgcagaggccaccccaacagcttacttcaactagagagaccctccggcctcacttaaagcaaaacattagaggcccctcctccaaaactagacaaagggaacccttccccatttcttgaccagccacaccaaccaaaggtgcccggggggtgcggggaatcaggcagggagcagggggaaaaaaaaaaaaaaaacaacaatcaaggaatgtgtcggaaggaatggatttgctgagaaagggggagaaaaaataaaaccgaaaccataataaaataagaaacaacagtgatggtgatgatgatgagaaaaacttaataaaagaaagaaagactccttccagaaaacgcccagtctggttacctaccttccactcttcaactgctaacttaaaagactttcttacgagagagggaacggccgagcgctgagctacaaggccagaccgaactcttggtgggtctcaggatgccagtggccccgcagccctgctccagcccccagcgtgcgcacgctgaggttccaggctggaggcaggaaggtggcacggtgtctggggagacccacggctgagtggtctgacctgcacctaccctgtgttcagcctaaggagcccgcagtccccggggggatggatacgcctggccctgagtctttgctgtcggttctcctgggccccacccgtctcggggcaagaagcggggagtcccttctccccaactccctgtcctgggccgccccggaggttcgcgtggctgggccgaagccgctttctaggtgaccgtgtaggtcacgtccttcacaatccggcccaacctgcatgacatctcgggaagggatgtgtgcaaagacgtggatgtgcgtgcgtgggcagcgtggcatggtggtggcacgtggtttgggagagtttctggggccgaattcgggccgtggactgtccgttcagcccagagtggctggggcaggcgggggggcacgcggggtgggccgtttttgtgaacctgcttgagaccagcgtgtactcaccttcaggacacctcagccagtctctcaggtggctgcccaagccacaggccaccctcactgactccacctcacacagacgcgcccagacgccttggagccgccaggtgctcagctcggcttggtttgtggggagcaggaaggagggaagggggccggcgggggcaggggggttgtgtctccgaggcgccccacccccccgatcccagcggctcagatgccccggctggagttgatgttaacccttcgactgatccgagatgcccctgtgtacacacacccagggcgggccttgaaggtttgaccatcatgactgattctggaagaaagcctggggtggctacgccgtgactgactgggtgaagggagggaagagggggaagcagggggaggccacgacagagagaccacgccggtggaggccacaccagggaaggccacgctgggctgagcggagccagggaggcaggtgaggtggggagacggcagaaggggcctgtccagctccgagtttagagaagtcagggagagagggtggcggtgacccacagccaactgccaggtgaagggtgactcgctccaaacagggaggccgggccggcacagcagagaactccagagatttgagccccgagtggggacctgcatgcccccacgaaacctggcctcggctccgattccaccccctccccaccctcgggaactgggacctcgtcctggggtcttgagagccaaggctccctgcccgggggaggaagaccgacggggaaggtgggttcgtctctgtgtcctttgctctgagaatgatggggtgcgagccgtgaccacagcctcacggtaccctcaaaatgcctgggaaatgggcacaacgtggcccttcaatcagcccccactccaggatggaaagaggagaaagaaggcgtggtcccagaacctctcctacaccagggccaagatcagccacttctccttgaccccaagtctcaacccgggtcaccaggcccaggggcacagacaaccccatgctgagaccctcgctgtgctgatggggatactgaggcacagcgcgggtagatggatccgaggtcggggaacaaagcggagacaggccgggaggcgccccccacccactgcagcaggccccgcctgggtccgtctgccgaggggctgtctgcggtcaggccgtggtccctcccgcagagaagggcggccccgcgagacacctactggactgcagcgtgcgctgccgcaccacgggggtgaaggcgcccaggccctgcggcgagcgggccgccaggcggaaggcgtactccgtgttgggcttcaggtcctccaccacgtaggaagtcgtcgggtcgaaggtccttcccacctgggggcagggcagagaaggacagagagggatgggggagagagagagagagacagaaacaaaggggagagagagagagacagaaacagaggggggagggggagagagagagagagagagagagacagagaaatagagacaggggtgcggcagagagggacagagagggatgagggagagaggtagaggggagagagaggtagagacagagatacagacagaaaaagagggtacggagagagacagagacggagagagacagagacagagagaaacaggggagagagtcagagacagagggacacagagacagagatagagacagagggacacagtgacagagatagagacagagaaacaaaggagagagacagacacagagacagagataaatgggagagacagagacagagagagatacagagacagacagaaacaggagagagatacagagacagaggaatagagaaattgagaaggagacagatacagagatagacacacagagacagagaaatagagacagagacagaaacacagagaaacaggggagagagacagacagaaacggaggagagagagattgagacagggacagagaaagagaggagagagagacagaaatagagatagagacagaaatagagagagaggagaaagaaacagatacagagacagagacagagagacagaaagagaggcagagggatagaaacacagagacagatggagacagaaaaaaaacacacagaaaacagagacagaaagagaaacagagacagagacataaacagacagaaacagacccggagggatggagagtgagcgtcagaggcaccggtgaagacaagacacagagagaagcacagatcaagagagatggggacgccgatacatacggaaccagagagaggccgccagcagcagaggagaaagacaaaggagatgagacagaggagaaaaaagtggaggaaaggcacaaagggacagagacgcaggagaagcagaaggggtgaggaagagcagaatccgcagcacacatagggacaaagagggggaagagacaaggcgggcagcgtcagagagcgccggggaggagcccagggcaggccagcccgtccccgcgctgcctcacctcccggccatggtcgccttcccggaagaggagctcgtacttgatgatactctcctgccgcggggggctccaggacagcgtgatgctggtctccgacctggcctcggcccgcaggttcatgggctggcccggcactgtgggggtgcagggagacaactaggagtcggggagcgtccaccccacaaagggggccccacctgctgagtgtccccactaaaagatgccagctctgggtgcttctagaatgttcttttattttcctggggacctcgcccccatcccattgtcacctgtccacctctgttcctccatcctctc[131 bp omitted]gctaacatggtgaaacctcgtctctactaaaaatacaaaaaattagccgggcgcggtggcgggcacctgtagtcccagctactcgggaggctgaggcaggagaatggtgcgaacccgggaggcggagcttgcagtcagcggagatcgcgccactgcactccagcctgggcaacagagtgagactctgtctcaaaaataaataaataaataaataaaaataaaaaaaataaaaatccccttcattttttttttttttttttgagatggagtctcactctgtcacccaggctggagtgcaatggcacgatctcggctcactgcaacctccgcctccagggttcaagtgattcacctgccttagcctcccaagtagctgggattacaggcacccgccaccacgcccggctaacttttgtatttttagtagagacgggatttcaccaattggccaggctggtctcaaactcctgacctcaactgatcctcctgcctcggcctcccaaagtgctggaattacaggcgcgaaccaccacacctggcctaaaaatctccctttcaaatcaccccagtgccctcgctggctgcgaattagatgacagagaaattagcagggagatatgtgtgcctattttatttcattttattttagtttttgaaacggggtctcactgtgtcacctaggctggagtgtagtggcacgatcatagctcactacagcctccaacttctgggctcaggtgatcctctcgcctcaccctcctaagtagctgggaccacaggcacacaccaccacactcagctaattttaaaattttttgtacacatgaggtcttgctatgttgcccaggctggtcttgaactcctggcttcaggcaaacctcctgcctcagcctcccaaagtgtcaggattacaggtgtgagccacagtgcctggcaaagggtgcctattttaacatttggatctccattctgtatccgctcacagacatggacagagtgccaaccgtcccggccctttgcttcagtgggtgcctgagtctgcccagactttaggttttgaaagcctgagccccaaaggaaagggtcaaacactcccagagagctggggtcccccatgcctaaatgcctcttccaagtcctgccacctgagcagggagggagactggcccactgccttaggggtgaggcagttttcttttatttttgagacagagtttcgctcttgttgcccagactggagtgcagtggcacgatctcagctcaccacaacctccgcttcctgggtccaagtgattcacctgcctcagcctcttgagtagctgggattacagacacacgctatcatgcccggctaattttgtatttttggtagagatggggtttcaccattattggccaggctggtcttgaactcctgacctcgtgatccacctgcctcagcctcccaacgtgctgggattacaggcgtgggccaccacgctgagccagcagttttcattatttcagaagcagtggcgctggtccctctaatgagaacagatgagggaggttcttaaaactcaaatgccaacaggggtgaggagttaacagagaagagggaaggaagcacacacagccccccttgtctcccacacagccactgggatctacccgggtgtttgatcttagccctatgggcttgtcaaatcagattttttaaagggaagccaaaaatttggctaggataactgtccaattttattttttttgagcagggtctcgctctgttgcccaggctggagggcagtggtgacattttggctcaccgcctcccgagttcaagtgattctcctgcctcagcctcctgagtagctggaactacaggcgtgtgccaccacgactggctaatttttgtattttttttttttttttagtagagatgaggttttgtcatgttggccaggctgttctcaaactcctgacctcaggtgatccacccgcctcagcctcctgaagtgctgggatcacaggcataagccaccacacccagccctctccgattttattttaatgtttgtttttgttttagagacaaggtcttgctttgttgcccaggctggagtgtagtggtgctatcatagctcactgcagctttgaactcctgggctccagtgatcctctcatctcagccttgagtagctgggactacaggtgtgcaccatcacgcctagctaatttttaattttttgtgtgtgtagagatggggtctagctacattgtccaggctggcctcaataaatcctcctatcttggcctcccaaagtgctgagattacagacatgagccactacactgggtcctatatatgtttcttaagaaatggggtattgctatattgtccaggctggactgaaactcctgggcttaagccatcctcctgcgtctgcctcttgagtagctgggactacaggcacatgccaccaagcctggctagctctctttttttttttttttaatttaatttttttgagatggcgtttcacttgtcgcccaggctggatgcaatggtgcgatcttggctcattgcaaactctgcccaggttcaagtgattctcctgcctcagcctccagagtagctgggattacaggcacccgccaccacggccggctatttttcttttgtattattaacagaaatggggtttcacggtgttggccaggctggtctcaaactcctgacctcaggtaatccactcgcctccgactcccaaaatgctggggttacaggtgtgagccaccgcctccggcctagctccccgattttaaatgctagcatgaaaatatatacatatattttttaattgtttttttgaggtggagtctcactctctcgcccaggctggagtgcagtggcatgatctcagctcactgcaacctccacctcctgggttcaagtgattctcctgcctcagcctcccgagtagctaggattacaagcacaggccaccacgcccggctaatttttagtagagatggggtttcaccatgttggccatgctggtctcgaactcctgacctccggtgacccgcccgccttggcctcccaaagtactgagattacaggcgtaaaccaccacacccggcctaaatgctagcatgaaaatatcttaaagcaccgtgcataacccacaaaccgctctgcggcttccagggagcatgcaaagaaccaagccgcacggccggggccccgagtcctgccgaccccacgcctcacctccctgctgcgtcttgacctggatggggtccgagaggggcccgtcgccgacggaggtgaaggcgagcacccgcacggtgtaggtctcgtcctccagcaggctgcccacggtggtcagcaggctgtcgtccacgttgtgcttctgccagttgcccacggggtgctccggttccatggtgtagtagacgcggtagccgcggatcaggccgttgggctccaccggctcctcccactgcacaatcatggtggtcgcgctgagcatccgggcttgcacgttccgcggcgcgctggccggggcctgctcgcctgtgcgggtgaccacggactcgctggggggcccctggccgatggagttgacggccgacacccagatctcgtactccgagttggggctcaggccgccgatgctgtaacgtgtggtggtgatgtcctctttaatctgatacggcccgtcttggctcttggatttatattcgatgacgtaataggacacaggatctgggttgcccgagtcccacgtgatggtgatgctggtggctgtgttctcagtcaccatgggagtcccgggagctttggggagagctgtgggcaggaggcagctgtgtcacgcattgggcacattggttgaggaccctgaaggctgtgtgacttttcaccattcagtcgccttctctgagccttgatttgcccagcagtaatcatgggcctcatgactcctgtcatcgtctacagcaaggggtaacaaactatggcccagggtccacccagtacccattttctttttttaatttttctttgagatggagtctcactctgtcacccacagtggcacgatctcggctcactgcaagctccgtctcccgggttcacacaattctcctgcctcagcctcccgagtagctgggacgacaggcgcctgcca[138 bp omitted]cccggccttttttttcttttttctttttttttttttttagacggagccttgctctgtcacccaggctggagtgcaatggctcgatcttggctcactgcaacctccacctcccgggttcaagtgattctcctgcctcagcctcccgagtagctgggattacagatgtgcgccaccacgcccagctaatttttttttttttttgtattttcagtagagacagggtttcaccat[140 bp omitted]aggctggactgcagtagtgcgatcatagctcactgcagccttgaactcctgggctcaagcagtcctcctgcctcagcctcctgagtagctgggactaaaggcatgcaccactgcacttggctaaatgtttcatttttttgtggtagagaaggggcctggctat[132 bp omitted]aaagaacaaccgtccccttcctagccatgaatgactgaagccaagagggtaactcggaggtgctcccacgctgcctcccacctgtgcctgaagtcggggatcgactccagcctgcccctccacctacgagccccatgggccctgctcacatttcaccgtgatctgagcaaccgcctcaatgacgcccaggctggacatggccacgcaggtgtagttggccgagtccttgacatctgtgagttccagcacgttccgacccacgggcatgtcatcctcgggggtcaggtcctcggccccctgcatccacttcacgtatggcatgggcgagcccacggccacgcaggtgatgttcacgttgccccctggcatgatctcgtggctcatgggcaggatggagaagcgcggggccacgcggcggactggggagggggcggcagtggcggcgggagggagatgcgaggggtgaggtggggtgaggttgggaggggaagacaggatgcggaggagaaaaagaaaagcaggaaggaagaaagaaagaaggaaagaaagaaaaaaagaaaaaaaaaggaaaaccatttaaatataaacagggctggttcttttccctctgttgatttttttcccccaaatgaaaagaaaacaaaagaaccaaattaaaaaaccaaattccaacacaaagaaaccaaaacttcaaaggaaggtacttcacaaacaatatatagagagatatatcaatatataatagacatgaagcattatctcatagcaacagggtttcatagaccagggtggctggtcacagcacagatacgaacacaaaaatttatcagcggtttctcatctttgcagacagcagtggcttcagggagcaggtggcctccgatcactcccgaatgggggcatccccttcggggagcgctggaagattctggctgccaagtttcgggatgtgagtgggttaggagagggggcaacttccaaccctccctggttctctggggatgtggcggtcataggacacttgttgaggccaggagacagagggagcctgagatgtcagtcccccactccccagtgacctggggccctgcccacttacccgccccctccgaccgggccctccaggaaaagatgagaaactctaatgaaatttttgtggtttttgggtatagaaacccttctaaaagcttctgtcagatctgacaagtttccatcaatagatgcagctctgagtcacaaacatcatgcaaaatagattgagagagagagagagagagaaagagagagcgagcgagagacagagagagaaaggagggaggaactgcagggggaagatctggattttggggatctctagtgcacacttacgtgacaccagagagaggagacgaatgaatggggagaaagagagaagaatagaaaatagggacagagagcgggaggggcagagaaagaaagaaagaagggggggcccacttcaatgctgcatattaattctagcagatgtgatccaatgtgacatgccacattgtcacatcacagccctggcagaataataaatagtatattaataataataataataataataattaataataataaacaagggaatgaacttgaacgttgagagaacagggacatgttctgtgcgtttcttagcggggaagtggatgcaaccttctctcaaagaccatgaaggcagcaggatgcatttcgggggctccgttttcggaagtcagatgggttccaggacagggggaaggggaggaggccagtgggcacctgaacttgcaaagagcactgctggcccacgggggctgtttaactgctgtgggaaggactcgggtgaacctaataaatccttctagcaggaaaaggggttgtccctgggtgacagtctcaggtcctaaagaagacacatgggtgcgtccccagctttggatgggtgaaggagtcttgtttcaactgcacagatgacggactggaggctcagttaggatccccatcaacacctgcctctgattttcatacgggattgggaggtgcagcctcagggggtggtctcagggggtctggtctacgatgctgaggaggaggttcaaggggataaagggaggtggccccaactccctcccttccagcctcggttcctagctggaaatcccaacccctgccttcctgaatccgggcgggaggcaaagagaaggggggacgtcggcaggcgtgggagtggggtccggaagctggcagcccttcggaaaaagaagccccacgaaaagtccagaagtcgcactggagacaggatggagggagtggagggtactgctccaggggaggagtcggggcatggggagacagaagggccatgcacacagagtggaggtgaggggcgaggtgccgtgagatggggggggcgggtggctttctggtagggctgggtggagggtgggggtgtggggggagaatggggtccggccagccagcggacgcggtccaggccagccgccggcacccacagcgaggcacaggtaagatgccaaggctgagttgtcatggaaacagaacacaatggggaaatgagcgtggggggagctaattattcaaggacagaaaaacggtatcgacgtccaaaacaaaaccaggaagaacaaatgaaataacaaagcaaaagcaatttaaaaaaagaaagagagaatctaaaaaacaaacaaacgaaaaaactccctccaaaacaaaacacaacacccaaaagcaagaagaaaaaaaaaaaaatcatggaatgggtgtggggctgaaaatcggggtctgaaaggaggaggactgtggcttccccagggagacgccctccccctggcagaacacaggatccggcctccccatccagcacccaagagtcttggccacgggtttggggcggccacaggggtgggagcctcgtggacaaaaatccttcggaacaaaccaacccagcccgactcaagtctctctctctaaagcccctctcagtccacttctcgacaccctgcctctcttagggctgagcaagttggaggtcccaaagctgaaatcacaaagcaaggtgaactcctcaaggtctctgaatcccatagtaaacctctccaggcagacgtggaggagctgatgtggctgaatgagcccagtggccttgggaaggtcccccatcctcctggagcctcagtttcctcatctgtaaaatggagggaattgggtatcctgccgagaaaggcattaacctgactcgggcagtgcctggcacagcaggtgctaaactcaggcatggagctggtgaagttacctttcagcctcccaggggctgggacgatcaaacagcttctctaccttaagggagttcagggatgaattataaaaaggaaatggaggcaggcgcagtggctcatgcctgtgatcccagcactttgggaggctgtggcaggtggatcacctgagatcaagagttggagaccagcctggccaacatggcaaaatcccatctctactaaaaatacaaaaattagccaggcgtggcggcgggcgcctgtaatcccagttactctggaggctgaggcaggagaactgccggaacccgggaggcagaggttgcagtgaactgagatcgtgccaccgcactccagcctgggtgacagagcgagactccatctccaaataaataaataaataaacaaacaaacaaacaaacgaaatggaaacagtaagaatttctactgaattcccatcttatttcttccttctaacaattttgagaggcaaacgtccttatgctcattttgcagatgagggaacagagactcagagaggtgacaagactagatggaactcacagaaaggaagtagtgtagccagagctcaaagccaggccagcctggttgctgcctctcagagaaaacaaggcttttctcaccatagtgagtaacgaggattacggccaagtatcaatccttggcatctagctctttcaaacttgtgtgtcctgacccactggggacaccaaagaggaaaaaagtacccatcacctataccaaactccatgtaatggccagttgccactggttgaataatatccagtagccatcataataaatgtccagaagccatcagtaaaaggcttatactcaaaggaattgttggaacgtcaaagggagtaagatctagctttaggatctaaaggttaagtgccaggccaatttatctattctgtaagggtcaacatcttatccaaaagaccctgttcctgtttgatcttatcttaaaatatctctccatagggatgtcataatttgcaaggtacctttaactttttttagaagtagagacaaggggatacctgttgaatatgtaaaagacttgcagtacagggttaactataaatcagtttaatgtgggagggcatttatcaacagcagtaattttagggttcacaatccccaacatggccggcaaccatcagttaaatggacctgccaataaattataatggctcctctgacacctaagaaacttgcccacttgctttctcacccgcctcatttgtttcaaagggtgtgctctaggaagagggctggtttgccacgagtttaagggaggatcatgcccattggcactaggtggttcagatctccccctccctggcggccttgtaaggcctctgggcatcctcccagctggcaagggcgggtgactgacgctgtgttctgcccggtttggtgctggcacccacccatgtcatctttccacccccggctgcaagcttgaggtgcaggttagaaagtaaggtgggcacggtgcccacgggacggagaggccccgcgggacccccgcccccaattaccgacctgaatggagggtccaggcaggttataaggggaccacaccagccttggtcctcagcacgctccagctggctctggtttccagctcttctcgtcaccgagtagccggggggtcccagcggggggacccgcttgggcgagggggtcgggagggtgggcggtggggtgggggggtggcaggttgtggggggtggtcgcttcaaaccccgattcacatggaaaaacaactcaaaaaccgtcaaagcaaccaggagacgacccctcccccaggcaggaagaggcagaaacacaaaaaccaaaaaagggggttgggagtgggggcgagggtaaaggggaggaaggaaactcaaaagtgaggtgatctggttgaagcactaggtagggaaccccgacagtgtcagacatctcaacgattcagcaagccgcagctccaaggggtgcgggggcggcgggggggggggggggggctctgctgggcattttggggtgggagaagattctagatacttctccaaactccaaaatgaatatgcggatggagagggcaggggagagatgccaagaaattgtgcagcctccggggggtttatttaagcttagattacacctgtcgggggggaagggaggggttggaaacattcctaattccatagcccacttcttgtcctctcctttgaactccagcctgtagcccaaggagggtgggcaccgcccctcagcccacctgcgtattttctgctacccttctccatcattttgctgtgcctccttccctccctcccgcctctcccccccaccgccagctccctccgccactgaggtagcgtgcaaggcccggagggacctggctggctccctggcccacgggctgaccagcggccttggcaagtcattggtattttgagctggacctttggatgcgctctagatacttttttttttttttttggtacccgctctctctttctctcatttctttttgtttttcccccagttctggccaatccatggacttccctcaccacccccccaacctcgctgtggccgccggagacacggggctttccaaatgacaaggtgtaatctaatattcccctcacaaaccccctcccccaacagaggaaacagcgaatgcagagggtgtgaggcaggcagcaggcgagaggtgttcagagctcagtgttcctgcagagtgaccccctcctcgccgcccaccctggccaaatggagggacgcctgccttcccgcccctggagtcccctctccccgatgtgatgagggtgggatgagaaggtctgggtctgatctaacactgcctgcccctagggttaagccagcggccttaggtagggaggcgtggccaggtatagtaagcacaaactagggagctggccaacacacctcaacgcgaggctttctgggaatacaggaggtgaggggtgttccagcccaccatctatgtctgtccctgttttggggggccaagaggtaaggggaacacctggggtcacatccatcaattttagggcttgggtattggaaatttaatttaaaaaacaatttttccccataaatttgcatagatggattgatctgaaaaggcctggggacaggtcacaaatactgaaaaagaagacctgggaatcgggcaatctaggccttgctggtgtcacgcagcaggtactggtttcttagcttagcactcaagactctgcgttaaattatgccagtcccatcggcctcttccaaaaccttgaagatatcctcagacccttcaaggtagaacattgctcaaccggcagggcacggtggctcactcctgcaatcccagcactttgggaggctgaggtgggtgaatcacctgaggtcaggagtttgagaccagcctggccaacatggtgaaaccctgtctctaccagaaatacaaaaattatctgagcgtggtgccaggtgcctgtaatcccagctactcaggggactgaggcaggagaatcacttgaacccaggaggcggaggttgcagtgagccgagattgcgccactgtacttcagcctgggcaacacagtgagattctgtcaaaaaaaaaaaaaaaaaaaaaaaggccgagtgtggtggctcacacctgtaatcccagcacttttggaggccgaggcaggtagattacctgaggtcaggagaccagcctggccaacatggcaaaaccctgtctctaataaaaatacaaaaattagccaggcgtggtggagggcaactgtaatcccagctacttgggaggctgagacaggagaatcattgaacccaggaggaggaggttgcagtgagccgagatcacgtcaatgcactccagcctgagtgacaagagtgaaactccatctcaaaaaaaaaaaaaaaaaaaaaaagtaaaagaaaaagaaaattcctcctgatgtctccagctttttccaagttcccctggcatcagagggtggcaaaccatttacatgggtcctgtgcactacgtttcaataatgctatgttgcaagaccaggcagtaaagacactacctttagccactaactcatactctaaaggcttagagttttaaagaaccagaaaagaacattcatagtcagggagaatataatctgatcatcttcccaccttgtcaaaagtcggaggagggagaattcaactacagctgggagtggagctgccagctgtatttttaaaaatggacacattttgacttaagccctttggatcccagagataaatttcaggaggagaagggcaagcctgaatattttaccccctgtaccacccagagtcagccaaagctggagatctgtcagtttagaaaataaataagagtgagattaggggttgcattttttcccctttttgcaattaattcctgtgactggctgctctggcaacaatgtaaatacttgtagctttcagaacatgccaggtagcccatctcttctggtgggctggtacttatctgcaagggtagccttgtacttaatatgggcctttgttgtccctttctgtggccacagaacttcctaggaaatgacagtggggaaaatgagagctatggctctgggtagtccgctgatctcatggggatggggctggagccaggagaaaatgagatcatgagatgagctcaggaaagcactagcgaaaaatgaggtctgagcaaatgaattagcttctgccctacaattatttttaaaagtttcccatatgccatcttattcaaacagtggacatgtgaagtacataacagggaaactaagacccacaaagaagggaagtgacttgcccagatcatttgcttgaatcctttatttacaacaatcctactgggaatgcttgttacacagagcacttagttcaatgaaatcctttcacctaccctgtgatcaaggttcatttatgatctctactgttcagatgaggaagtggggactccaagtggtcaaatgactagttcaaggtcacgtagccagggaggggcacagacaaaactggaatccaggtctgccagagtccagagcctatgctctcatcactttctgggctgtactgcccagaaagtccaagtggtcttcagagaccctctgttcactcagttccaatgcaccagcacctagctttggtggaggggctgggagacccctttctgccatcttttggcactgctctgagggtcagcctggcagctcgcatgctgggttaataagcaaatcttactgcatctaaagtcctcttgccaacttggtccaggatttaataattggtaagtttggagaaggtgagtgagggacaagagggggaaaaggtgattccaaagtctggcttctgtcctcaacatcgtctaaacggggtagtcagctggggttggtggttaaaaatctacacggatattttattggggggtgttttttattgggggttggagtaagactctcaagggcgtgccttttcttggggaggggagcagaagatgggggtgtgcatctctgaagatttgcaagagtgagagacacacagagagaaagagagttgaaaaagagaaagagaagcagagggagagttggggaggcagagagagcaggggagaggctgtgtccaaggttcccctgggctttttccagaattccacagctctgatgctcaggtactcagaaagtgaccatgctgtgttgctggacaaaagacgcctgtgaccgggctcagagtctgagaggggatgggggaagcagccagtgctgcctgggaggcagaggcatagtgttccaggtcagataattggccaagtctttcttccaaagtctgtcaggctacatttcctaatgggcacttctggattggtacccagccagaatgcatacagtcatcacagcagctgccattttgagtgccaattacacaccgagtatgcatggtcctgtgaaaatggtgctgttattgtcctctcccctcatttaaaactgaccataatccatgtttggatatgtcactaaaatgaataagaactcaaaatgctagtgcacattcagcagtacttcaaatgcctgggtttgggcttatttgggagcgcaggaggcagtctcattctgaggtagaaggatgggaacatgcctgcttaagcttccttccaacatggctgcctggaggcagggagctgagttactacctctggggaaagaggagctggccagtgaggtcaggaaaattgggctgctctctccacacaccccacccatgttctgacctcctgccatctgtctgtgccacctcccttgtgcccttgtgcctaagtggtcactttctgccctggcatcccagctgtgggaccccttctgccctcctggatgatagctgggacaggaacactggcttttaaatcacaatgcgtttggagaacaaccacagaacagctcaacccaagaaaccaaaaccaaatagcacagacacaagacagaaccaaagacgagtcgctttgggggagaagaggaccaggtgaagggaatgggaggggaaaaaagaaccatttgattttttccccccaaaacgaaacaaaaccaaagaaaaaaagaaaaaagaaaaaaaaaagaaaaaggaaaaaagaaaaccaaaagagaaaaacagaacagaagacgagaaacactccaacagaaggcgttgggaattcaccaaaccaaaccgacaagagaggcatgcagagaaatttttacattctcccagcatgcatcaggcccaagttaccatgacgacgaggagtgcaaaaaacttagcaacaacattaccaacggatgcagaggcgaccataatgcaagcatcgcatgtgtgcggccggccctaggccgggctgggcgcggctgagattttcgtgtctttctgggttttgcgctcgcttggcggttttttgtttagtttgctttgtgcttatgattcatattccatcttttaaaattgttgttcatttttctattttttttccgtgtgtgtgtcagcgtgtgtccgtgtggtgtctacatgtgttttgtgtgtgtgcgtgtcattttcagaatgtaaaaatgtgggtaaagaaagtaaaaaagaaaaaaacacaccaaccttctcgaagctctgagggatgtaaagggggtttgatgcagaacacaatgacatgggaagaagagaaaaaataggggagatacagagagtaaaaagaggacttcccaaggctaaaagctgcaatagtttgttgttttttttttctttaaaccaaaaaaaaaaattaaaattaaaaaataaaaagaacagcaatgacctttttgtcttctctccactctgccctcaacatacaagatctactacatttgcctttctccattcttttctaagcttgattctggagcatctaagacccaggcaaagatggggaaacagaacctcaccccctcaactgtccccaagaggatggaggctcatgctggggaccccacctctgggggatgaggacacagaagcccccctcccttcttgcaccctcactaaaggccccacccggctccctgccccacacccgctgtccacactcttttgagccctgctggatttacaaacccccatcccaggtgttggcagagaaataagcaggttaggtgaagaccagtcagttggagtcacgaacgcattacaactcaccagaggtgccgtgacagtggatcagacgtgcccctacccaccacccgtccatacacccacatccccatcccctccccctccatgcgacctcctcctcagagacaaaatgcaaaaccccaggtccaggaccaaggaatcacttcagggccagcgggtgctgtggatggtagggacgaaggtggtgagtgagggtctgtgggtaagggatgagccacacggcctcctggatggagaacaactagggcttggtacttcgcatgggggaaactgaggcccagagaaggatgtgattgagtcaattacacagcgctaactggggcagccctagggattgaagggcgccctggcatcctggcagaagctgtttctaccacaaatctgatcagaaacagcgactaggaggtgaaagggaggaggaggaggaagactacaacttctgaaaagacccaagagccaacacacgagataagaggaggccaacggaggcatctgggggcaagggagccccctggcacctttgaggcagcaccaagggacccacaaggaagtaagcttccttggggcaggggagcggggaggtgctggggcgaggcccccacgctgctgggcatgactgagtgggaattggaaactgagagtaacaagcttcgctgggtgccgtgcctgccccagctcggtgcaactaccgagccccccgggtgcctgtgcccgctgtggctccagcctcccatcggcctggactgcccttctcggagagtcattaggaagaggcagaaggcgccgggctccggaccagctggtggggggtgggaggggcagcctcgaagacccctcctcaacttctagattgagggccctggattagggggggcagtgaagcggggagctacgaggccacaaagttgggagaagcaaagccagcacacagcacgggaaggcacgacacaccacagaagccaactcgggtgggcaggcaggtggggtggggcggggcagaggcctgcaggctcccctggccctgtaggcccaagactgaccccctcaccctgccccacgccttcctaccccaccatcactgcctccccagagcctgctgcccacggggcatctctcgcaaggcacgaggaagggaatttaagctgcccccattctacaggcaaggaaactaaggcccagagagggacgccgcctcggccaaggtcccaccgcgaccggggaggggccttcctgcttgggtgtgcaggggacgggggagcccggaggcggtgagcccgaggagggagggggatgggacggggcgggtccctgcctttgacctggacgcggcgttccctacctcgcacgtagaggttggcaggtgaggagtagcgcacgccggcgctgttggtggccacacactcatatttgccctggtcggtttcctcactgctttcaatctgcagggctcctgtgggaagatgggaaaaagcttggtctgttagaggggggcccaggagtgaacagggaaagctcccccaccagagtgctctctggcctgtctcctgtgctggctgggccagagaggcagataagaggtgagaaaacctggaagccctagcttggccaggccttgtataacctccacccccacatctagccccaccagggcctggacacaccagattccccagcaaattctccactcacagtggaaaagcagctggtcatgagactgctgcctcatgactgccaagttgaattacaaagatggagaaaagtgtgtttgagaaagcactaagtgatgctctcctggccagaaggaaagagtgggttggcattcacaactcataaccatcatttgatagatccagggacctgagggggcccaccacaaatcatgtgaaaattcagggagctggtggttgctttgtttcattaggtgcccgtgagtaaatgaacatgggtctgggttcctcagttgtgtttggaatcctagtcctcaaagtcctcaacgcccctaagtaaatggagacggggttgtacttcttcaggtgtgtttgaaatttcaggattaggttataccctgaggcagctaaagtaaaaaaacgttgatgctggtgtgtatcaagtatgtttgagatcaaagccatggatccaagccttctggcctgaaactgattgaagagaagtcagaatttccccaagtattttaagtcatctaaataaaagtctgaatttacctgcttgtatttaaaaccacaagcctgaagtcaacatcctggtgctcacgagtaactgaatggacttcttcaagtgtgtttgaaattatggtcctagacccaattctatgatgctcataggtacccaggattagattaaattttcaaaagtgtttgaaatcaggggtctgattgaaagcctctcatactcacaagtaaagttgaggctaaaatgccccaagcctggatcaaagaatttgttggtcatgagtaaataaagatacaaagaagagggcaatttttcaagcatatttaaaaccacaggcccaaatccaaggtcttggtgctcatgagtagatgaaaataggactgatttcccctcaatacatttgaaatcacagacccaaatcaaagacttcactttccatgaacctataaaaatgaatgaaccttctcaagaatatctgaaatcacaggccttgatcaaacactactgtgcccatgagaaaatgaaaacgaggccaagatttccccaaagatatctgaaaccacatgcctgaaacaagtccctcattttcaccagtaaatgaagctgagtatatctgaaattataggccttgataaaaacttgagtgcccacaaataaaaaataaggcaaaagtttccacacgtatgtttgtaatcacaggcctggatcaaagtccttattttcataagtaaataaaacttagtgtaacatatctaagtatgtttgaatcacaggcctggacccaagtgcctgtcgaccatgagtaaatgaagatgagtgaatatccccaaatgtgtttgaatcacaggcttcaatcacagcctatggcaccaggggtccaaaaatccagactgagctttccagccttgtttgtgactatcccacagaaatgacatggacccacagattgggggattctctctggaggtcatggataaagactccgtccccatagagcactgcctattctccctggacctcgaggttctgggaagcaggcagtatctccatcactaaggaggcccagagagggtcaggagactgctctaggtcacacagcatttgtagcaaaggtagggctggacactgattcttccccaggttcccactcaggccttctcttggctcttctctgaggcaaaagttgggtagggggaaagggatggagccgaccgacctgagagtgcatgtctctatgtgtccttgggttagaacctccagatcagaaagaactgtggagctggaaggcccactttgcatgttcgttttgtttctttttttttttttttttgaggagtctcattctgtcacccaggctggagtgcagtggcatgatcttagtggctcactgcaacctctgcctcccaggttcaagtgattctcctgcctcagcctcctgagtagctgggattacaggcgcccaccaccatgcccggctaatttttgtgtttttagtagagatggggtttgaccatgctgcccaggctggtcttgaactcctgacctcaggtgattcacctgcctcggcctcccacagtgctgggattacaggcgtgaaccaccgcgcccggcctgcatgctcattttagaggtggctaaaccacatggggctcccagcactctgggggtcttgccaggtagggtccttcccagagggggagagagcgcccccgccttccacagccaggtgacctgaggagtcacctcggccacattcagccccctggccacagacacagacacagacgcagagaccggactaacactgggtggaacaaaggtggtggcagggtggacacgcatggaagggggcctgggggcaggccctgtggagcctgaggggctgagtgggcagcaagagcgagcgtgagtgggtgggtgagtgaggagcctcttacctcgaatcggagtgctttctgtaagggaagcagagagaaccaggtgaatgtcacaaggcggttgttggggggccggggggccccagggaagctgggctgggccgtaagccaggcctcagcactctgccccagggaggggatcgagccagccctgggcatacggaccctgcgggctttgctgaggaagctaggagaggcctcctaggagcagggtgaggtctgagggcttgtcaaagcaggagggtttcctgtagaaggcgggaatctctgggggtggagggatggagtctagaagcctctctggatgggtgaggggcgtctctatgcccagggaaggtctgtcagcctggccctttggtggccttccctctgggctgagggagggaggttcatcacccccccttccttctttccgtcttagggagcccagcaagagactgctttcaagtccagactaggaggggacaaggagcaacaggaattatcttgttagagacaggggaggtgggtggggttagtgccccagtgccgggcattaatacagccaaggaagggtgtcacagacaggccgagtaggagggacagggagagcctggcagccttcttaccaagaggaaaagaggaaagacctgtttatctgggccttggaggcagggatggttaactgcaaagcaggaaaaggcggctcggggctggaacgttactccctctgctcatgatccagggagaagttttgggcccccttctctctgctgctgatggccgataacttgataactcggctggctggggccaagaagatcccaagacctcgatctgccaggagtggccagacacgtgaaaaagcagctccttctgcgtggcccaaacccattttgcagacgggccaactgaggctcagaggggaatctctgaggtcccatcatgaggcaggggtgggcactgagcctagctctccagcctcctgggatgaggagcttctggcctgaacttttcggagtccctgaattatctttcgaggtgttctcgtgaggccactctgcaccctttagaggggagcaaacagaagtttgcctaaagttacaccctggagaactggaatccgagtcagcggaaatccaggctggcctttgctaggacactgggatgacgatggtggaagtcagggttaaagaaagtcttttcaggccgggcgtggtggctcacgcctgtaatcctagcactttgggaagccgag[134 bp omitted]gaggcaggagaattgcttgaatcggggacgtggaggctttagtgagccgagatggtgccactgcactccagcctgggtgacagattaagactgtctcaaaaaaaaagaagtcttttcaagttggccaaatcactcagggctattctatcaagtggaaacaatgtatcccttagccattaaaaggtgttccgcctcccaccctgagagagatgaagggactgatagcataggctgatatcagtcactctcactttagtatgaattagtcccacaactgatttcaggagattcaggctgaatgctgagaaaagtggatgagaagtgcccagtagcagctaggctggaaaaatctccactccacgcccagccccagcccccaaacttctgtaattaaatccttttccagcagggctaaggccaagaaaaaagtgcgggaggaaatgttgttaggtgcgaagttccatgagcccgaggatgcctctgaacccccctcagcctgcattttgaggtctgcctggccttgtctcttttcctcttttcctttgggtggacttgtctcttttcctcttttcctttgggtttctttctctgccgcacactagtgccagctggggagggctgaggggccggtcgcggggaggagggagagggcgttagtaaacataccaggcagagtgggtcacagttaccatcacggtggctgttagtttggtgaggagaaggggagcagaaggggcacaaaggggatggggcgttagttgttgacgtggtgatgaaatcagacttaccaaaggtttctgaacgtttacaacaggaggataagaaaagagaacaggaacgttaacgggtggttacaaagaatcctatgtcctcagcgaggaggggagggcgggggaggggagggggacgctcagaataataataacaacatttcttatgattcctaaagtggcttatgttcactgagcacctagcaggcgctagacattccatcctggagaggtcaccagaacacaaggaaaataggcatgttttatggggaaactgaggccaccgctccccctgcttgcagaggcctatgagctgcaaacatcctcagccaggctgggagataggaggcgatttgtccccccagtgtgaggtctgagtctctccaaggaagacattctgggctccacgtctgatctttttggggcttggttttcactaaggaggaggagcagaaagcggagaacaggtaggtaggctctttggtggggggcaacgatgggcagtgagtgaggggcgctggggatgattcggggaggtactgctgcaaagggggctccgtggcgggatcctcggaggaaggggagagagaaagcaaaaagaggggtgtgtggaggtgcagggtgatctcaacagtgacctgaacgaaggcagggcgtcaagcccggcacaactgaaaacagtaaatccgtgacacagacaaacacgcatgtgcagccacacgtgtgctcccaatgtatggagacacatccccaccacgtgtgtccccacgcacgagcactagggaggtgcaggctgagaggcgcgtgcgcggatcactgccctgtgtgcacaggcacgggagtgactgcaatgtgggtgcacgtgtggccgagatgcaggcggacactttgctccgggcgggggaagggaggcccgtgtgtgacagcagccaggcctgcacacctgtgcccacaggcgggaggcaggccaggccggcacagggagcccagacatgcacacgtggacatgtcgtgaagcggggggacaacacacacgcagacacagccccccagacagatggacccacagatgggccatgtgggtgctttgtggagacacaatggtggaaccacccgtctccaaggctctgtcccaaggtctccctagcccagccagggcctgaacagacaggctggactgcccgtctgtgcccccttacagacctgaagccccgccatcacctcttactgctcagccttggagagactctctccctgtagttttctatggctccccatcaccttacttgtcacctctggacacctgccattgccttacacagcttccactactcctgcctgtctgggccccactgtattctcactggacgtgcctaatgcttctgtagaggatgctctctgccaccttccatagctccctattacatacccattgaagctggtctccccttgtcaccctccatggctcactgacacttctgcctgtctgtctcccattgcttgggcactgccgatacccaccatccttggcggctttctttcttttcagagatgagcgtcttgctacattgcccatgctggtctcaaactcctggcctcaagcaagccttctgccttggcctcccaaagagctcggattacaggcataagccactgcgcccagccccctcagtggcttcctatcacccacaactgtctgtgggtgacagctgtgatctcactgcctgagcatgggagacactctccccgcccatggccctatataactccccatccttgtgcatgtctgcatccattatatcttcattggccaggtgttgaagcactattcttctaccaccctctatagctctccagtactcatgcccatctgtgccccctaatatcctcagtgtgcggctttgaagacatttgcccccactcccccagagccaacgcctgccacggccacacactgtctctgtctgtcctccagtagtccccagaacttgggccctggagatgctccccaccccctgctgccctccaaggctcccacgtcctgtcagccaccctcactcacctgatcgcagctgtttgatgcgtccattgctggcactaggatccacaggcaggaagtccttgaaccaggtgatctcagggtcagggttgccgctggctgcacagagcatggtggctgtccgtgtccgctccaccaccttcaactgtgggcccatgtcgatgttggggaagccagagggcagctggtcctctgagggcagagacgtgagagaaatgggcatggttctgagcactgcacagccactcctgagcctggggctcagggactgcctggccacgggtccagctcctccctggctgcgtgacctcagccatgggtgccatcctttacagccagttctctctctttttttgagacagggtcttgctctgttgcccaggctggagtacagtggctcgatcatagctcaccgcagtctcaacaacctgggctcaagtgatcctcctgcctcagcctcctgagtagccgggactacaagcatgcgccaccacgcctggctaatttttaaaatttttgtagagagggggtctcgctgtgttgtccaggcgggtctcaaactcctggccccaagcaatcctcccacttctgcctcccaaagcactgggattgcaggcatgagccactgcacctggttgggtccctcttctgtacaagggggaggctggtgtcagggagctgagccaggtagaatgatatttctcactggggggtgactctgctgccctgggagacactgggcgatgtctggggatatctgaggttgtcacaacttgggggtcaggacttgggggtgggtgctcctggaatggactgggtggggctgagagatgctctacaccctactacatataagcacaaacctggccccaaggtccacagtgctgagtgggttcatttacagcagcctgaggacgcctttctttttatcttttaaaaaatt[131 bp omitted]ggtgaaacactgtctccattaaaaacaaaaactagccgggcatgatggtgcatgcttgtaatcccagctacccgggagactgaggcagaaaaatcacttgaacccgggagacggaggttgtggtgagccaagatcacgccactgcactctagcctgggcgacagagtgagactcggtctcaaaaaaaatcaaactaaaaataaaaataaaataaataaaatatagagatagggtctcaccatgttgcccagattggtctcgacctcctgggctcaaggaatcctcccaccttgacctcccaaagcattgggattacaggtattttacaggtatgagccactgtgcctggcccagaggacaccgtttttattttttatttatttattttttttgagatggagtctcactcgtcggccaggctggaaggcagtggcatgcactccacgcccggctaatttttgtacttttagtagagaaggggttttgccatgttggccaggctggtctcgaactcctgacctcatcatccacctgccgtggcctcccaaagtgcctggattacaggtgtgagccacagccccacctgcctttctaaacataaaccacactgctcccccgctgtacacccttctgtggtccggccaccctcagaaggaaccctgcctgcttgcccgctgctggcccctgccaccttccctcctctttttctctctggcccagtcaccctggcctccacggctctcaaagtcatcaagccccctccctcgggtcacctgttctgttccctcagcctggaatccccgttcccacatctgtctactgatcggaacaccacctgggactagctccaactcccttgctctaaatgcccccacactcctcactctcctctgcagcagggaattctatctgtaacggtgcatctgtgtcaccacagcatccgtagcacccagcgcagaaccgggcatacagtaggagctcaatcaatgaacaaacaactcaatcctggttgagcactcaatcctccagcaccaggtgagtgagtggcaccaggtctccagcgctcggtatccctcttgggtggtgaggttctggctcccctccatggtaaatggagaccggtggtgatgtgggggcgggggggagcggggacaaggaggagaaactcaggtccctggaatctcctggtcccagagctccctgagcggtgggaacatgcttctgggctgaggtgatgaggtgagccagctaagtgacgggctgccttgcatccagggtgctctacaaaccaagatgggccggccgtgggggctcacacctgtaatcccagcactttgggaggacgaagcaggtggatcacctgaggtcaggagttcgagaccagcctggccaacatggtgaaaccccgtctctactaaaaatacagaaattagccaggcatggtggcggacgcctgtaatcccagttccttgggaggctgaggcagaagaatcgcttaaacccaggaggtggaggttgcagtgagctgagatcatgctactgcactccagcctgggcgacagagcaagactgtctcaaaaaaaaaaaaaaaagagattaggaaacagccacgtagggcagactaataaccgtgcccccccgcccccccaactccactccaacggacaagtgacaaaaaagtgacaaatcgcagtgctgttaagaccaagaaataggcagctcctctgcatctggtaggaatgctggagtggagggggtaaagggccgcaaaaacagccctgtagctgtatttattaataaagttttatcagcc[137 bp omitted]gcttggtgacgggcacctgtagtcccagctactcgggaggc[137 bp omitted]taaagttttattggcacacagccacgcccattcgtttctcagcttttccaacacaatggcagagttttgggttgttgctgcgacagagaccgtccagcctgtagagccaaaaatatttacttcctggtggtctggagaaaaagtgtgctgcttcctggcgtagacaatgtttctgtttgtttaaagaatacacatgtatttgcttacaaaggcccagatgggacatggggctcaggggtgggtggccgtggacagaggtgggcaggaggccaccatcttgggaggaaactgagccccaggcaagcagcaggagggcaggaggccaagatggggcaagggagaggtgggcaggatccagggaggggaagccagaatcaatccctgcctccccaggattacgagagagcggcagttccagctcgggggtcactgcttggatgggaaaagccccagtggaaagccctgagcactaacagcatcccaggcgcagcgcaggcaacggaacctgtgatctcctccaagccttttccatagagggggaaacggaggcacaggcagtcacacacttgtcccaggtcatacagccagcatgtagcaaggatttgaacccaggcctggctgagctcagaagaagctgagcaggaccggctgcaaaagccctccactcaaccaggtctgaacccatcggggccctgaagggggcatggctggatgccgtctgaggcagttcaggcctcttgtccatccttcctgggccagggacctggacgaccttgaaagtggctctgattggctactgatgacatcatcggagatgagggccaaaatgactgggcctcactcaattggtcttggtgcccacagctgggtctgtcggcatccccctgtgtgtctatgcatgctcgtgtgcctacgagggaaccctgtatttcattcatgcgtgggtacatgtgtgccgcatgtatgtgctcacgcttgcccgtgcccacgtgtccacacgtgagcaattcccgtgtgtatgtggccccgcaggggtccccataagcgtgtgtggacagcagccagccagggtgcagggggaggtctcggccgcctgacgctaccgagaacacctaattaaacaaaaacgtacatcgcgaaccacactctgcccagttcctcggagtttaattaaaacaacagtgcaggaggcgtgtgtggggtccacaatcagatggcagaggaggaggaaggcagggagtggccctggcagtccagatggtcccccaccaactgccagggactggccggaggtgcccggagctcagggctggtggcaaggtgggtgggatcgggtcagggtatccaaggccccgggccccagcaggaagaatgagctcccagcccaagcaggcccttccaggcagccggagaggagagagaaaaagggtgtgggctcggcacggtggctgacgcctataatcccagcactttgggaggctgaggaggtggatcacctgaggtcaggagttcaagaccagtctgaccaacatggcgaaacactgtgtctactaaaaatacaaaaattagctgggcgtgctagtgggcgcctatagtcccagctactcaggaggctgagccaggagaattgcctgaacccaggaggcggaggttgcagtgagccaagatcacgccattgcactccagcctgggtaacaagagcaaaactccatctcaaaaaaaaaaaaaaaaaaaaagagtgtggatgggcgcagggggcatttttttcccagactccgggggaccgggcagttgatggcttcacagcttgtccttttaataccctgagtgctcagagtgcaggctggcttggggcaagagaaggcaggttgttctgtcccagcctgggaaaggtcagggcaaaattatctgctaggaagagcagggcgggccacggtgggcctgactccgcccccgctccttcctccatcccccagcaggatgggatccaggacccacgcaaatgaaattgtggggtctcttgttagaaaagtattaagactttccagaccacaatagcgagcttttatcttttcttccccctcccccccaccccccttttagagacagggtcttgctctgtcacccagactggggtgcagtagcatgatcatagcccactgtagccttgaactccgaggctcaggcgatcctcctgcctcagcctcctaagtacttgggactataggcaggccccattacaccaggctaagttttacatttttctttttgtagagacttggacagtgaggcatggggtctctatgttgcccagactagtctcaaactcctgggctcaagtgatcctcttgacttggcctcccgaagtgttggcattacaggtgtgagccacggcatgtggccagcagcagagctttaaaaagcacggggcctttcttttttttcttttgagatggagtctccctgtgtcacccaggctggagtacagtggcgcaatctcagctcactgcagcctccgcctcccgggttcaagcaatcctcctacctcagcctcccaagaatccgggagctaggatgacaggtgcacaccaccatgcctggctaatttttgtatttttagtagatttggggtttcaccatgttggccaggctggtctcaaactcctgacctcaagttgtccacttgcctcggcctcccaaactgctgggattacaggccaaagcacagggcctgagggagggatcctggatgactgtacaggtcactcgcctgtgatgccagtcccagtttcatgggaccagagtctgaaatcgagtactactagggccgctgtgataacccctcccagggctccaagctggtcacagctgggctgccgtggaggacattggaatagcctcatcttgggaagccacatgcaggggtcacctcccagctaatggctggcagtggctcatatacatgactgggatgtctctgcaggtgacaggtggaacccactcacctgagggctgcagaaggattggtaacaagcatcttactaaaccagaatcctaacagtgatgaacacagtaacggggaagtagaattgaccaaatatggcattgtgctaatcttgctccctgtatcactcactcatctggttcacggaattaccccttgtggtgagaaccattattacccgattttttttttttttttttccctgagacggagtcttgccctggtcgcccagactggagtgcgatggcgtgatctcggctcactgcaacctccacctcccaggttcaaacgatcctctcctgcctcagcctcccgaatagctgggattacaggtgcccaccatcacgttcagctaatttttgtatttttagtacagacagggtttcaccatgttggccaggctggtctctaagtcctgacctcgcgatctgcccgccttggcctcccaaagtgctgggattaccggcgtgagctaccgcgcccagccatttcatttttattcattcattcattcattcattcatttattttgagacagagtttcgctcttgtcgcccaggctggagtgcaatggtgtgatctcagctcactgcaacctccgcctcttgggttcaagcaactctcctgcctcagcctcctgagcagctgggattacaggtgcacgtcacctcacccacctaatttttgtatttttagtagagacgggc[136 bp omitted]ctcagacaagttcattaacctgccctaggtcacacagcaaccaagtggcagccaggacttgagctccacaggctgggcccagtgctaagaccaaactgcagtggagaaggcagcacagagtggttgggcaagggtttgtaggcggctgtttgaaatgatgctgaacaaaaatttgttcacaaaattgcttcctcattataaaacagcatcactcagacagccccctataaaccccttgcgacttgttcaagaaatgcatttaggctgcatgcagtggcttatgcctgtaatcccagcactttgggaggctgaggcaggcggatcacttgaggtcaggagtttgagaccaccctggccaacatggtgaaaccctgtctctactaaaaatacaaaaattagctgggcgtggtggcatgtgcctgtaatcccagctacttgggaggctgaggcaggagaatcgcttgaacctgggaggtggaggttgc[132 bp omitted]tgcaggcccgtgtgaatgtctggggaagtggggcagcagtttctgcctacctagcatccgttcatcctttattttttgtagagatggggtctcgctatgttgcccagtctagtctcacgtgtgatcctcccacctcagcctcccaaagtgctgggattgcaggtgtgagccaccatgcccaaccctgtttatctttattcctttgggggaaccacactcactcttggctccaggtaggagtctagccaatcagagtgtttgttcctcctgagccacagtgattagttcagggaagggaatgggatccaagttcattggcagtgggggaagtctcactaaggatatcatcaatacagaaggaaacaaagccaagagacagagagtgagctctgagaaaattcaatgagcccctggatccagctgaacctgaagccagccactccatggaattttaattctgcacatcaattacctttctcgcttgaacccatctgagttggatcagccttttgtcatcagaagcacatgatgaagattataaattaggatgattctagtctctcaattcctttctttcttgcaaaggcacaataaatccccaccagtaggcgctgggccctgagactgttactggttggataagggagatcaaggtcctcccaaaaaacacaaagcaggagggtttggggtaactttcatgtattccttttgtgcttgtccccaaagcccagggcccagtttatcctccgcccgccctgaggagcccaatacctcggaggacagtaagcttggcatggactgtgatctccccaaccgagttctgggccacacactcgtacacgttttcatcccgcggtgtcctcagcggctggatcctcagcactgcccctgcactctcatcaaactcaatcgtctgccatgggcaggggaaaaaagaacagagtgaggctggggtcccaggaaggttcctgtctaggctgggctaggctgggctgtaggggaatggcagtcagccccatgatcctgggggtgactgggagaattgctgcaggctgaatgtgcacgtgtgtcggtgtccagtataaatgcgccgcagacagggaccagatttgggtacatataagaacagggtgttgtgtgcatgtgtgagggtgacaaatgtctgcaagcccatgtgacaggcatgcaaaggcatgtgaagacatgcggaatgtgtcaatgtgcacgtgtgatcatgggcgtgtattgagagttgtaaagttccttctgtgtgcagtggtgctgtgtacactgcactgtgaagaagactcagagagggcagggctttgcttgaggccacacagcatggagctggtagagcaagtaaggcgggcagggccctggctggaggctgcgcagccatgcttgcttggccacagatgatgctccacctggggaacgtgtccacgaagtccactgtggctgaggtgctgtggccctgccttgggggagcattgaccccaggctgcctccccctaccccaactcacctcaaagcgctgagagttgaccttcttgcccttcttgttccaggtcactcgtggcttggggtcacccgtggcctgacacacgaaagaggccacaccccccgacacgccgatctggtccttgggttctttgataaacctggggggctctggggatacagtggaaagaagggggggcgctgatgggtccaggcatctggctaggataccaaggagccacgaaaacctgcattccatgccctgcccacggaagtgccatgtggccaatgaagagaggaggaggaaagcaaggatgacaacaaacaccctcccacctcgccccccaccacggcacccatgggcacccaggtgcccacatatccccacttccacctgcaacagccacacctgctcacacacagtggatacaacctcacctgggcacacctgctcagacacagtggatacaacctcacctgggcacacctgctcagacacagtgccactgggaaagatggaaggggaaacctgtgagatgctggggtccctaaattcagcacctgaaccccccctccatggtgaccagccaaaccctggagggccctgaaagcacttgccagaataacttggtctaatttcctggtgagacatgtggggaaactgaggcacccagcatgggggcggggggtgaccatgggacatgaggtcagagccagtatttgaacccagagctccagcttcttgggaggcatccaggaggtggctggacacgaggggtcagtgcccaggagagtgctctgagctggaggcaggagctcagaaaggggaagtaatatttaatatttaacctctccaacagcatggagaggcagtgccatcctgatcgtcattttcttttcttttttttttttttccagacagtgtctcactctgtcgcccaagctggagtacagtggtgtgatctcggctcactgcaacttctgcctctcaggttcaagcgattctcctgcctcagcctcccgagtagctgggactacaggtgcccaccaccatgcccggctaactttttgtatttttagtagagatggggctttaccatgttaaccaggatggtctcggtctcctgacctcatgatctgcctgccttcgcctcccaaagtgctgggattacaggcatgagccgctgcacccagccttcttttctttttcttttctttttttttttcctgagagatagggattcactctgtcacccaggctggagtgcagtggcacggtcttggctcactgcagcctagacctcccaggctcaagcaatcctcccaccttggcctcccaagtagctgggactacaggtgaaggccatcacatctgtaaccccagcactttgggaggctgaggccggaggatcacctgaggtcagcagttcgagaccagcctgaccaacatggtgaaaccccgtctctactaaggaaacaaacattagccagacatagtggtgggcacctgtaatcccaactacttggcaggctgaggcagaagaattgcttgaacctgggagatggaggctgcagtgagccaagatcatggcaccacacttcaacctgggcgacagagtgagactccgtctcaaaaaacaaaaacaaaaacaaaaaccagcctggggtctcactatgttgcccaggctggtctggaactcctggcctcaagtgatcctcccaccttggcctcccaagtagctatgttgtccagcctggtctcaaactcctagcctcgagcaatcctcccacttcagcctcccaagctgctggatttataggcgtcaaccaccatacccagctctgccatccccattttacatgtgaggaaactgagacacaaaccaggcaagggacttgctttggctggacatgcacagccaggcggtggctgagctgaacgtgctcctttgaaccagcctggctttcacatccacattcttcaccctccatgacgatctgatgtattcattcagtctctgcaataaagcctggagtaggagtgtttttgtttttgtttttgttttttgagatgaagtgttgctctgtcaccaggccagagtgcagtggtgccatctcggctcaatgcaacctccgcctcccaggttcaagtgattctcctacctctaactcctaagtagctgggattacaggcacgcaccaccacgcctggctaatttttgtatttttagtagagatggggtttcaccatgttggccagggtggtcttgaactcctgacctcaagtgatccacctaccttggcctcccaaagtgctgggattacaggtgtgagccactgcgcctggcctggagtacgtgttttttttttgtttttgttttttttgagacagaatctcactctgttgcccaggctggagtgcagtggtgcgatctcggctcacttcaagctccgcctcccaggttcacaccattctccttcctcagcctcccaaggagctgggactacagatgcccgccacca[185 bp omitted]gcacctgggacaggctacagtatctgtggagaattcattaacattgtttcctttttatcgactatttttacagtaacctttgcatctcccagagggacactagatttccggtcacagtacacagtaatgttacaatgtatcccctaagatga[144 bp omitted]gcctcccaagtagctgggactacaggtacccacagccacgcctggctaatttttttattttttttccccgagggctgcaacatacttacaagagcccttaggaagcagcctatatatccaataaaaaggaactgatcaagtgaatgccaggctatctatgcagcagaatactacataagtataaaaagggggaaaaagc[142 bp omitted]ggtggcaggcacctgtagtcccagctactcgggaggctgaggcaggagaatggagtgaacccaggaggcgaagcttgcagtgagccgagatcgcgccaccgcactccagcctgggcgacagagtgagactccatctcaaaaaaaaaaaaaaggaggaaaagcctcccttcctcggcgctgcctaaggaggtggcagccgtctcctcctcagcatcatggccgccctcagactcctcatgaagcccaagatcgtcaaaaagaggatcaaggcgttcatccggcaccagtcagaccaatatgtcaaaattaagcgttaactgggggaaacccagaggtattgacaacagggttcgcagaacgttcaagggccagatcttgatgcccaacagtggttacgggagcaacaaaaaacaaagcacatgctgcccagtggcttccggaagttcctggtccccagcgtcaaggagctggaagtgctgatgtgcaacaaatctccctgtgctgagatcgctcacagtgtttcctccaagaaacgcaaaaccaacgtggaaagggccgcccagctgccgtcagagtcaccaaccccaatgccaggctgcgcagtgaagaaaatgagtagacggctcgtgtgcatgttttgtgtttaaataaatgtagaaactgccaaaaaaaaaaaaaaaagggagtggggggtgggggaaaggatgcttttttgtttcagacagggactcgctcttctgcccaggctggagtgcaatggcacgaacatacctcactgcagcctcaatctcccaggctcaagcgatcctcccaactcagcctcctgagtaactgggactacagtcacatgccatcacgcccagctaatttttgtactgagttttgccatgttgcccaggctggtctcaaactcctgtcctcaagcgatcctctcacctcgagatgctttttgattacttatttatttatttatttctgcggcagggtctcactccgtcacccaggctcaagtgcagggcgcgatcttggctcactgcaacctccgcctcctgggttcaagtggactcttctgcctcagccgcccaagtagctgggattacaggcacacatcacgcccggctaatttttgtatttttagtagagacagggtttccccatg[137 bp omitted]agatatattattaaatggaggaggtgtgtataagcaagaggtaataaagtgtcgcaaatggtaccgttgtacgattttttaaaatgaaaaaaggggttgggcatggtggctcatacctgtaatcccagcactttgagaggctggggcaggctcactagatcaggagtttgaggcccgcctgaccaacatggtgaaaccccgtctcttctaaaaatacaaaaatcagccaggcgtggtggtgcatgcctgtaatccccgctactcaggaggctgaggcaggagaatcgcttgaacccgggaggtggaggctgcagtgagctcagaccgcaccactgcactccagccggggcaacagaccaaaactctgtctcaaaaaaaaaagaaaaaaggaaaaagggaaagattgtatgtatgtgtagaaacagtgctgcctccagggagctaagtggctggacacagggacagagatttccactttggtacctttttacatgtagaactaaagacaaattgaagaagttatttttatttttatttttattttattttttcttcttcttcttatttttttttacagagacagggtctcactctcacccaaggctggagtgcggtggtgcaatcatagctcactgcagcctcaaactcctgggctccagggatcctctggcctcagtctcctgagtaattggaaccacaggcgcttgctaccacatgcggctaatttttaatcttttgcagagacagggtctcgctatgtttcccaggctggtctggaactcctgggctcaagtgaacctcccatctcggtctcccaaagctctgggattagcagtgtgagccaccgtgcccagctgaagttatctatttttatttttatttttttgagacagagtctcactgtgtcacccaggcgggagtgctgtggcgtgatctcggctcactgcaagcttcacctcccggattcacgccattctcctgcctcagcctcccgagtagctgggactataggcgcccgccacc[185 bp omitted]tgagctgattaaagaaaaaatggagcaaaactttgttttaagtaaaagtttggggtctgaggagaggctgaggtctaacaactcaaacttgagcaacgctaggactttgagcctctacgaccagctagaaaagggtagagtgagtccaggggccacacaggttgaccagaaaagttctggaaagttccagctattcagaagcccagagaggccttaagaaggcccgaggttccaagggtaggtccctgtgggccccaacgcctacccatccatggctcaggctgggctttaaacaaaacagagttcctgccccagtggcctgaccagcctaacctccctcactcaaggctctgctcctgttgatatgaccgtatgtgtgtgctttgagcatctgtcccaaaagtcactagacctggccgggcgtggtggctcatgcctgtaatcccagcactttgggaggctgaggcggatggattacctgaggtcaggagttcaggaccagcctggccaacatgatgaaaccccgtctctactaaaaaaatacaaaaatcagccaggcgtggtggcgggtgcctgtaatcccagctacttgggaggctgaggcaggagaatcgtttgaacccaggaggcagagggtgcagtgggctgacatcctgccattgcattccagcctgggtgacaaaagcaaaactctgtctccaaaacaaaacaaaacaaaaaaatcactagacccaccatgtacaggaatgcacagcctcccttaactttttttttttgtttgttttttgagatggagtctcgctctgttgcccaggctggaatgcagtggcgtaatcttggctcattgcaacctccgcctcccaggttcaagtggttctcctaactcagcctcccaagtagctgggattacaggaacccaccacaacacccagctgattttagtatttttagtagagagggggtttcagcatgttggccaggctggtcgcgaactcctgacctcaaatgatccacccacctcagcctcccaaagtgctgggattacaggtatgaggcgccgcgcctggcccctcaactcttatttatccctctgttgcagcaacagccaatcccactgtac[134 bp omitted]atggtgaaaccccatctctactaaaaatacaaaaattagcccggcatggtggcgcatgcctgtaatcccagctactcgggaggctgaggcaggagaattgcttgaatccaggaggcagaggttgcagtgagctgagatcacgccattgcactccagcctgggggacagggcaagactctgtctcaaaaaacaaaccaccacaaaaaagatcacagagttcagaaataacagcactggaatttgaacccgggtttctgcctccaaagccgacatcttactgtcccttccacatccagaacttgagcctgattagggcagatgttttgctccacattgaggctggggctgccccctccttctggcctcaggaatggtgacccggggccatgcgtcctcagccaaggacatgaggaaaagtcactgtggccgggtcaagaatgttacttctggtaaaaatccctccctctggagctgctggaaggaagggcagaagctggctgagggtagagacgcatccagctgcctgtctgacctagagccagaacacaccccttgccccctccaatccagcaagcaagaccgggcgggtgggtgctacaatcagccactgtctgtgctgttccttcctcccagggtcccgtcctcctcctctcatctggcagcttcaacctcagctcggccagcacctcccctggggagccttcttggattactgcaggcccggtcaggagtcccttatgcccccaccgcagcctgggcgtccccagaacactgggctgagatacctgcttatgtggctctcagcacagaggtcaagggacagccttggttccctgggacctcagacttcttctcggtgtgtggtgacccttgagaaaacggagctcccaacatcactgcctgctctcggatttggaggggttctacctctcggaagcacccccatcactgcagagcagataccctctcggtcttctccaggcagctttgggatctgagccagcctggaagagctgtccctgcccactgagtcccccgttagaaaatgtcttgcaaatgcttgcaatctctcctttggacgaagcttccccacctttttctcagcaaaggggcagagacacaggaaggacacctctggggcttgagggcgccgcgcctgcagctcgagaggcacaaagacacgccatgtgctaagctttatgcctgtggccaggaggagcaaaacaggctcagaaaggtgaagaggcctggcgcagaggctcacacctataatcccagcactttgggaagctgaggcaggcagatcacctgaggtcaagagttcaagaccagcctggccaacatggcaaaaccccatctctaccaaaaatacaaaaattagccaggcctggtggtacacgcctgtaatcccagctacttggaggctgaggcaggagaactgcttgaacctgggaggcagaggctgcagtgggagccgagatcgagcctgggcaacaggacaacagaacaagacttcatctcaaaaaaaaaaaaaaaagaagggacctgcctttggtcacacggcgtgtgatgggcagagacaggattccaacccaggcctacctggctccagtgccttgaaaatcacgcaggctggataaatggggttgggggtctttattgaccacaagtaccgtggatgtccctgtctcttagatgaagagacagaagttcatgtggtattgccaatatcaaaaaagctggaaagggaacccagccctctctggaggcaacgcgcctgagcctcccgctccgtggcctggcttggccccatctctgtttttccatttcagattctgcagacaagaatccagtgccagagctggtgacccacccaccctgtcccctccaaccctgcccggggccagccccacggcatcctgggaaggccccactggacctgaagtggtttctagagcagaaattgttcccctatgcctgtaaccccagcactttctcctgtcaccccagcactttcgcctgtcacaccagcactttcgcctgtaatcccagcactctgggagaccgaggtgggcagaccacctgaggtcaggagttcgagaccagcctggccaatgtggtgaaaccccatctctactaaaaatacaaaaattagcagggcatggtggcgggtgccagtaatcccagctactcgggaggctgaggcacgagaatcacttggacctgggaggtggaggttgcagtgagccgagatcgcaccactgtactccagcccaggagacagaaggagactccgtctcaaaaaaaaaacaaaagaaaagaagaactgaaaggggtcagtactgaaggccagacatccccaatgcaggtgagacaggccaggaagactcaggccctggaggcagccagacagatcacagtgcagctatacctggcttctggtccctgagggagtgtggtcattgggaacttggcctgtgggaccaggcagctcaggttcaaatggccacttctggttgggcacagtggctcactcttgtaatcccagcactttgggaggctgagttgggaggatcgcttaaatctaggagtttgagaccagcctgggcaacatagtaaaaactccatctctgtaagaaatttaaaaacttagccaggccaggcactgggactcacgcctgtaatcccagtactttgggaggctgaggtgggaggattgcttaagctcacgagtttgagaccagtccgggcaacacagtaagaactccatct[212 bp omitted]gaggcaggaggatcgcttgaatctgggaggcggaggttgcagtgagccgagactgcgccaccgcactccagcctgggcgacagagtgagactctgtcacaaaaaattaattaattaaaataaataaataaataaataaataaataaataaataaataaaaattagccaggtcaggcacagtggctcatgcctgcaatcccagcactttgggaggccaaggcgcttcagcccatctttcttttttttctgagacaaggtctggctctgttgcccaggctgagtgcagcggtgcaatcagtttccatagttgtacgacggggatgctgataatcgcattcacctcatcagggtgcggtggctgatctgaatgtataggggcatttactaaaaaacagcatgaggctggatgccgtggctggctcacacctgtaattctagcactttgggaggcagaggcaggtggattgcttgagctcaggagttcgagaccagcctgggcaacacagtgaaaccccatctctacaaaaaattaaaaaaattagccaggcatggtggcccacgcctgtagtcccagctacctgggaggctgaggtgggaggattgcttgagcctgagaagtagaggttgcagtgagctgagatgctgccactgcactccagcctgggtgacagagtgagaccccatctcaaaaggaaaaaacgacaataaaaaaagcagcatgaaaataagaaaaagcgcaaatgaatgaggcaggggtgtatgtctccagtttgttaaccagcagtaatacctacgtttgtggtaacacaggattgccggcctgctatgtccctagcagcaggcaggggcttatgaaatgtccacatcacaagaatgctggatgtggataatgatatgagctctgtgacagtgggtaagggaggctgagccactagcccggggttgtgcagcaggttggcagcagagccaggattcaaacccagcctgactgcagaacccagtctcttgccctactgccctcatcccctatgtcctcatgggcctgagtgatgccttctccaggtccttcatggtggggtgagtcttggcattgggccccagatggaccctcatcctcttcacattacagccagaaatgcttccttgcccatctctaaactataccaacctctttcatctgcaggccttcccgggtgctgtcatcctgacgaggaatggcttttctatcggcgaactcctatacacccacaaaaccccagtcccaatgccctttttcccaagaagcctcccctggctccacctgagacagtttgtctgcctgtgtgtctgccaccaggtgtaggtactgcccacagcaagggaaggtgaactctgtggctcactaagcagtgatctcaaataagtccttgcctcgttttccctcattgggaaacgtggaaggtaacagaactggcacactgggttttgtcaggctcaagggagaggaagcaggtaaaattagtgcttagcatggagcctggggctgagttgatgctggggaaacagacgccgtcatcatcattacggttattactttatgaataccagcattattatttatctctgaatctcttagggctcagcacacagtcctcagcattcagcctcatttgtggagcataaaagttccatttggcaaaatggagggccccagggaggaggtggggagtgtgcccacacacacacagccataaatgcacacaggtaaacaaacacgcagacccctgcacatcccgtgccggcttcttaccttctgctgcacagcctccaacgagcaggaccacaaggaggcccatgggaccaaccacagacaccatgccagggccccaggtgggcgccatgcttggcagcgacctccgatctccgccctggagggggatggccccccggtccctcacagagaggcctcgagccgagcgtcagatggggcaacgtctgcagagacaatggagggctgtgagaggcgagtggggaaatccaggagaccttcatggaggaggcagagggagggtcacatggagcaggggagggtcctgcgggggctggtcatgggacaatggggaaggatcatggggtgatgggatggaatgaaagtgctgggcccttgctatagaattaaggtgtctcccccacaaaaaatcatatgttgaaacctagtccccactatgatggtaacaggagatggagtgtttgggaagtgactaggtcatgagagcagagacctcatgaacgggattagtgtcataaaggatctcccagaaagctcccttgccctttctgccacgtgaggacacagggagaagatgccttccacgaaccagaagatagccctcaccagacaccaaatctgtgttgccttgatcttggacttcccagcctctagaactgtgaggtaccaatttctgtcatttataagccacttggtctgtggtatttggctacagcagcccaaatggactaagacagcctccaaccaccagctaaaccccaaccccagcatgagtccccaacccaggctgggcccctgactcagaccaagccccacaccaggactgaggacctgagcccctgactcagaccaagccccacaccaggactgaggggtgctgagccccagttttctccaactcacaggctgcttctcaggaaggaggggactccagactatgctgctgtctggctctaaaacctgatcccccaggttataagacaaatctcttccacacacctgcctgtccctgccctgctctaagacctcccatggctcccagagcccccaggggaagccactcttgctgacttcactgtttcctctcgcttggaggtacagccaggccagccaagctcagtcccacctccaagcctttgcttctgctgtgccctctgcctggaatgctgtccccaccacatgacaggtctcagcttagctgtcacttcctcaggaaacccttctctgcccctcaaaggtcaattccccctacattctacatcccggagcatcagatatgactaaggttatcctccgtggtattcaccctggttcccaaactaaatgaaaagatgttaatcattcagcacgtttctcccacaagaacctcaactcctccagggcagaagggtccctcgtcacataccttgaaccctggaatggccccctccccatctccccaatctccactctgtccagagccaggtcagagggccagggaggggaagggagaggcccaaggataagatctttgttgcctagtcaggctggcacccatgccagcccatgccctgggcgggtccaggccgtgaccacaggaactggtggcgcataataacggggcagcccctgtgattctgactcccaaaatacccagctgcggtcacctcgcccagccctggggcggtcccaggggaaggatgggcgggtagtggccgggtcacagcctagggtgacgaacgggattcggggggcctcagtgtacatagttaggccacaggcatacagtcagaccagccacagagaacgatgcctgctaaatcacgccacagacatacacagatgcacacagtcaaaccaccgatacacaccgacacacagtcagactgcaagcggttgcatatctgcaagagacacagaaacaaatgcattcacacagtcaggcagcagagacgggcacacacacacacacacacacacacacacacacacacacacacacaatcaggcaaataaaacttgcacatagtcagaccacaaacacagacaggcccaaaatcagaccacagacatacaccaagccagaaaagatacacataaggggtcatggtggggcaggcagtacacatacacagttgggttacagggaactgcaaacatgcaattagatcagagatacctacaggtgcacaagccggtcaaagtcacacgcagacacaggtgccggcacactgtcagactatagataggccagtcagtcagcagaccacaggtgcatgtgccagccagccaaatagagatatgcaaagtcagattcccttcctacacacatatgtgcacacaggcaggctacacagacatgcacacacacagtcagactctaggtacaccttgcacacaaccagttggggactgggaagatgaaggaaataaagcctagagcacagtcccttactctgagtccctgccctagccctttaagagcaaaagttgccaacgaggaaggcggtggccccagatggagaaaacagcctgtggccagctggggctagggtgaccacagcggctggccctgcccagaaatgcacatctgcttggccacactgagggggcgaggtcagtcccagaccactttgagcagctgggcaggcctgcagagagcctctggggaaactgaggcagcatagcaaacctgaagctcagagggcatgggtaggagtcacttgcacagagagcccaggtggggcacatatatggagggccccagccacagctggctctcccacatcccacgaggacctcagggcagcatcagccaccttctaaaccaggcagccctaattacaccctggctcccacggcagaagccatgttgggcccacacctccctgatgtctgcgcaggatggggctgagtcaggcacagacaggcagggcctggccatggactccccccagatccgccactccagcctgtcaggggcagggacgaggggctacagtaacaggagcatttggggcattggatgatgtatcaggaatagggtggtgggaggggcccagggagtggggttcagacactaccaaagacaaaacatcccggggtcccttaggtgccaatcctccctaggagaacctcccatgatggggataggaccctgcacacccacaatcctcccaccgactcctgcttccacgaaaaccccaggcgtgaggtcctctgcgaggatttgggagagaagatccctaggtcccatcagctctgccttcagaatctgtccccaacctgcccacttcttactcattcttctgcctccacttcttccagccccattgtcaccgacctggacagatgtcgtcacctccatcgtggtctcccagctcccgcccttgtcccttgatctgttccactcacagaaaccagaaagcatctgcaagcacccgagtcagggctcgtccttcctctgcccacagccctccatggctcccacctgcctcggggtcaaagcccaagtccttcctgaggcccaccaggtcctgcacgacctgccctgtcccctccgtgccctcccctcctccctttctccccctcctccctctgctccagccgcatgggcctccttgctatttctccaacaccccaagtgcagtccagtcctgcccccgggcctttgcgtgggccattcctggatttaatattggctgaggaccaaaaggtgaatgggaattgggggcaagggtgtctctgcactacaaacagcatgaggaagagcaagggggcagcactgagaggtcctaggagggagagggggagagatgaggacagagaggtgcacatagactagacccacagagcagccaggagccctacgtggccctgggcagggagggaaatggccaggttggtgccaggccaaccctccaccatgtcctcttgcaaaaggcagcctgggccaccagccttgccactgccaagaaagggaaattaagtcaggtgcagtaatctgcaagctcccagtaaatgacacggctgttaggaaaagcatggcagcccatggtggccagcgaggctgagccagggctagggagaaggagagggagtgaccgctggacgctgaacccatgtggggctcagggagggtctctgcccgccccacctggctctcaggggctgcactgcccaccactagctcacggcagctggtcagaggcaggcgcttgacttttacagatgaggaaactgaggctcacagaaaaacagggactcagccaaggcccccagctggggtgggacttgggtctagagcccacgtttaatcttgtgactgtgtctttctctggccactgcgagatctctggacaactctctctgggactggtagagcccgctggccgcctctgggggctcccccgcggtgctaatggggggcgagtgggcactcattccaaccaggcgccggggcatgggtcacgcgatctgggagccggctttgtgtgcccacgcggtccaggaagcataaaggggtgattatgacccaggccgggcagcaaacaggctgtgtcacccgcacgaggcgggggctcctcgggccagaggaggctcccggtgcctctcccagcccaggctccagctgtagagtccatgctgccctgtcctggggcgggagtctgggggcctagtcctaaccctcaggggccatcccatggccccagggcaggagaagctgaggctgattatgccagcagtgggactcaggggaaagacccctgaccctgcacaatctctccaccttcacatccaccccccacccacagctctcccgtgccaccgcctggaacgtcatttccaggactggaccctggcctccagcctccctggacacctgggtcactcccacatccactcaagcagggacaggcagcgagggcccccctgggcagcaagcacaggctctgtggccactggtgggctcaagtcagctctggccaagccactgtccctcccagggcgccattatctccctatcaggaaatgggctcagggaggggctgggtggggctggcccttcccggaactgaagtccggggacctggctttaattgactattgatttgtattgggacgacgtgaaggctcagggcactgtccccaggggtcctggtggccaggagtggatgggtggggcagacagggaaccaggcccagccctggagagggaaatcattaaagtccactgggtgcctctggggtgctgagccccattaaatgttctctgtgttttctgctgtttaacggattaggaaaccgaggctcaccaagggtcctgcatggaggagggggctgggctgggttaggatttgaggccagagcccggctctcagtcgagcccagagtccacatcctctgggcgcccaggctgccaaaattgcccgtcagtgtgtcccccatgctggcttcatggaacaacttgagacgccaagatctgggggtacccctgcttctgctcacacacccacgggggctcccagctcctgtgctcgctgctctgggcccttcttgatgtgactgcatccatcgtcttccctaccccctcttcccgaaaggtcctgcagttctcagaatacactgcctcaggtctctgagcctcttcgcatgcaggtcccccacctggcacacccttccccagctggcccatggtcagttcatcctgtaagctgcagccacgagatgcctccactccaagctgagccccgttcctcctctgctctaaaaccctccatggctcccatcaacacgtattaaaactcagactgctacctcagcctccagagctgccagcccggcctctgctgacctcatcacgccacaaccccccatgccaggcttcccttgacaccttgatcccccccacttgtggcccctggctcccacaggggtatttacacacactgttccttccacccagcataccctttcacatcctcatcaaatctcagccctcatacttgtcctcagggctcagctgagctgtcacctcttccaagaagccctcctggatgccccagggtggatcaagacccattctgagctaccccatcacagctgtgctcccactgtgggtctgtcaaccccctggatggaagcccttttcccaccccaggaacgtggcaaagcccctgcatgcactggatgcctgctgcataaccagctccacctggcactttatccacagcatccctggcgtcacctgggtttcagaggtagaaactgagaccatagacagagaccaccccaggcaatggagaccgagacggggacagcctcgcatccaccctagggggtctggcagagacttaaagggtgggggtgaggctctggaaggaacagacagctgaggccagcctgggttctgcaggaagccccttggggagggtcaccaaactctgtcagctcagtacttgggtcctggaacggcttagagcccagggacgggaatgggtaaaagaaaggtacgagctgccctgaccgtctcagaagacaacaccacaggcccctccctgaggccaagccccccagtttcttaaagccccccaacaaagcacagaggcaacgtggggtccacaggcccgagaggagcggaaacaaatggatggaggtaaacttcctgcgattttcgggggtggctaagagcagggattcctgccatgcaccccccaccgctacctgccccctctgcggtcctgttgcctcctccgccttctgcgaagtccccagtcacagctcccccgggctggcagcgaaggctgccccgcgcctggctccgcccccgggaggtgggggaggagagggggtggggggaggaggtcgggctgggggccaggcgggggaggggaccctgcggagcataacggtctggagttttccaaagtgcaagcgacgggcctgaatgggggggcgccaggcagcagcaggcccaagctggccctggagggcggccggcacggtcaggcccgcgctgggctgtggggacccccgtggtccccagcctcggagcctggagggggcgcgacaagagagacaaagcccggggcggcccgggcctcggggtggaagggggtcccgggcgcactcaccccgcggctcggagatcgggcccaggccccgcgaggcctccacagggcccgccgcagccgctccccgcgtccctcggtccgcccggagcgcggcgcgcagcgaagactcgggagaggcctcggcctggggagctcggcctgggggcggggcaaggggcggggctgtagggggcggggttgcagtgggcggggctgcaggggacgggccccgaggagggggattggggggcagggcggggccccggccggaagtggggcggggggaccagaggggagccccatctggaggcgcggagagcctccgcaggagtccatgaaacactgagcgaaggggcgccccagggagggcacgacccaagacccctccctcccgaagacgtctcacggggagcctctacactgctcctcgcttccccagctctgatcgtagccatggcaacgcatgaggaggctggatgccggacagggcggcggagggctccccaaacacacccaactacaggaggtcggagaaggggcagagttcccctcccagtctgggtgggaccggaggcacggtgatgggggcggggggcgtcccctcttccccctcttagaccagagggtaggggagaggtgcgggcgcagaggcttccctcccgctgggggtccaggggaatgaatggggggacaccgtggcagaggcccccaccctcgccacaagcctgaggagggggcggagagcacagggccagattggaaacagatggggccgccgtgccaggcccgcgacaccggagcagagggagaggaggagggagagggaggggcagacctgtccgggcggccaatccgagccagcgttgcgcccggggtgcgggtttgaaaactccaccggaggggcccggaatgtagaagcccagcgggacctgggggtctggggacgggacaggggcagaggccgggatggagacccaagggctcccgcgtctgctcccatccctggaaaaaacgcctctcttcccagcattcgcgctgaggacgaagcccgaacgccaacgccaacgggatgtcctgggcgctcagctgccatcagctgtgcttcctcaggccaccggccacggctctaggaggcagaccccaccatcacccccattctgcaaagaacggagccgagaaagagagagaaacggctgcccacggccgggaagagcaggaattggaaccagggtttgggtccagaggaggagctctcaccacagcgctgctggaggcctggggcccccggaactgaggatatatcatgaataatttcaagccccttgggtttatctaggtacagggccatcctgaagacagacgccccactctctagaagccattactcagtggggcaaaggacgtgggctttgatgggagacacacaggcggctgtgagagcccagcagaaacaattccgctcccacggctcccgtccatgccctcccactgctacctcagtggctggctcccatctccttcaaacatcgaataaatgcctccctcactgggggataccacactgcccccttcccttaccatgcctcagtttccctcctctgcaaaatggagcatggaatcgccccgccccatctccaacaataggtggcctagtccacaaagcaccatgcacagtaggtggtctgtgagtgtctgcacacaggctccctgcctgcccctttgacacagagcacacaggaggtgctaaacacaggatgccgtgacgtcccccgtcccacgcagccccatcctcgacgaggtacacagtaggtgcttcatggaggaggctgcctggtgccccagcatcaccaaaggcacacaggaggttccctgtgtcaatgtaggcgtaggagcaaccagcgtgacctccccaacttggctgggcacacagtgggccctcaggagcagagtaggcaccttgcttgtatctgtggcaaggcacggggctcatacagactcgagtttgaatccagggatgccccgtgtgtcaagaaagcacccgtacctctcgggccgacagtttccccatctgccacataagccaagcactgaacaggtgctcaatgaatccacactgtcaggaggcttggggctgcatgacctgcagcatacaggcctggctctgggctgcccaggactcgggacggcagacaagggcttgccagccgcttcccagccagtcctgccctctctgggcctcttgtccatgtctctgtggaggcagactcttgcccctattccacagtggtgactgcagttggcaggggacacagccacccccgaggggctgggggaggtgggccaggtgccctcccccttggctgggtggccccatcagcacagagccctacatgcgcctagtccccgggtctgcctctcccaccagactgtgacctcaggaggcagagcaggatttgtctcggtcacccagtgtccccagcacctagcacaggtccacagtacaaaggaggttctcagcaaacatttgcacaatcaggcccagcctcacccaggagagcccctccgaccttattctcctccaaaggccacactgtgtgtgcccttgtcataaagcaggcatcttcacctacccttttttcaagacagggtctcgctctgttgctcaggctggagtgcagtggcaccatcatggctcactctagcctcaacctcctgggctcaacctcctgggctcaagtgatcctcccacctcagcctcctgagtagcttggactacaggcacatgccaccacgtctggctaatttttggatttttttgtagacatgggatctccccatgttgccccgactggtctcgaactcctagactcaagtgaacctcctgcctcagcctcccaaagtgctgggatcacagacatgagcccgtaataaggttaagcccagcctacccttttctaaacaaacatttccaagccccgatgccaggcacaatcctagacacacagtgaccaagactgacaaagatccctgccctcagggtgtggatgctctaaagagggtgacacatgagaaacaaaagaaatcaaatccactgtgggtcagatggtggtaagggccctgaggatgattgggttcagggttgtaggatgaggagggaggatcgcctgaggccaggagtttgagaccagcctgggcaatatagcccatcatctctacaaaaacttttaaaaattagctgggcctggtggcgcatgactgtggttccagctacttgggaggctgagggcggaagcatcgcttgaggccaggaagttgaggctgcagtgagctaggatggtgccactgcagtccagcctgggcgacagagcgagactctatctctaaaaaaatgtaaaataaaataaacacaggataggagagaggggaggtgacatgcgaacaaagaccaggagaaggtgagagaaagtgaaagaggattccaggcagagagctcagtccatgcaaaggccccggggcagcactgcacctggcgtgttggaggaatggcgaggaggccagtgttgctggagcagagtgaggaaggggagacaaagaggaggggaggggagggaggggagggaaggaatggggacaagatgcgcacggcctcagaggcctccaggaggaattgggctttgaccctgaggaaggtgggagccatggagggctgtgggtagaggaaggccctgactcaggtactcacagacatgctcagctgctgtggggagggcagactgtgggggatgactaggctggggctggactgggtagaggatgagggagaaaggcacattctaggcagacccaatagaattttctaaacggctcatttggggatgtacagaaaagaggggactcaaggatgacttctgggtttttggcctgagcaccctaaaggttaagggtggccacctccaggaagccctccctgattgccccgcctactccgtgcccttgggggctgacccctggacccctccaaaaacgttccattgatatgtcctctgtatacacccaggaggcggctgcccttggggaggaacacggggctggatcacgtcagctcccacagctgggacgttggggggtaatttttttcaaaataacttttcttctaattataaaataggcgcgtgcagcagaaaattaggtaaaatcagcataaagaagaaaataaaagttacccacaatccatccctcgcctagagagaaactgtttcatgcggccgttctcattcattctttccctgtacatgtgctgagcacctactgtgtgctgtgctgaggacacagtggtaagcatgatggaaccagcactcctgcccctgttggggggcacagactagttgcaggggggatggacacccacagaaaaacaaacactgtcaataacataaggccgggcagtgctaagagatgccaaaaataattaaataaaccacactgcaaggctgcaaaaactggggggtccctgggggagcctcttagaagtggtgataattgcatttacacctggaggaagagagcaaatcagacatacaaacacctatgacaacagagttgcaggcaggaggaacagcaaa[133 bp omitted]ctctgcctcccgggttcacacaattctcctgcctcagcctcctgagtagctgggattacaggcgcacaccaccacgcccggctaattttttgggtatttttagtagagacagggtttcactatgttggccagactggtctcaaactcctgacctcatgatccgcccgcctcggcctcccaaagtgttgggattacaggcgtgagccacagcgcccggcctccttccagtctttcttctatgcatacgaatgggtgcttttctttcgttcgatggggatcaccattagcagaccatgttccagtgtccgggtcacagaatttaatcaattcccacttgtttatcccattatgtcccttataaacaacactgtgagggacattcttagacacagctgtgtcccttcgtctcctgaagaaacttccaaagcaggggtgactgcattgggatgttctcaagcctttaaaccttccctgatggggaaccctcagataaaaccatacccttgaccggggcaggaccccctcccccagcctgtctgtcccacctccttcatatttggcaccaaaacccccagacatttcatttaggtacaaactctgtactcttggctgtgagagccagagagaaactggttgggcagcttcctctcagcttccctgccctggtcttgcccatgcccaaggctcccgcctcctacctagcacagcattcatgacccggggcatgggcgggtgccaaccagccaggagcccgcctcacccatgttcacatcacagccctggcgccgggtctacccgccagccgcaccgcagcgggcatgatgcccaccacaggcacgccccagctccatgtctgcctttttcacctgtccgcccccgcaggccaggctaccttccccttcctggaaaatgtgtgacaccttcaggcatggctggatccagcaaagccattcctcccatgtcttccccaactctgctgatagcagctctgtccttccaggggctcaggctagaacctggaagctggccctcactgcttttcctccctcaccccatatggtgttggtctggaaatactctcacgtttgtctcctaaatttctactcactttgtccatctttctccatattcccttcccaacccatccagcctgatcattgcctgctcggaccagcacagtcacctctgccctggtccccagcctcccaccctcgccctccagtctgtcctccccacagcacccactacatggtgccggtgtgcacctgagtcaggtcccgtccctcctctgcccacagccctccatggctcccacctccctcagggtcaaagcccaagtcctcctggtggcccacaaggccctgcatgacctgctccatctcctccctgccctccattcctccctctctccccctcactctgctccagctacatgggcctcctcgctgttcctccagcaccccaagtgcagtcctgcctcagggcctttgcacaggctatgcctctgcctggaacactgttcctctacattttcttgtcacttttcttctcacccttccattctccctcaaggatcacctcctcagaaatgccctggctgaccacctggctcaagcagcacccatcacccattacccattattttactgtcacctgaaattctctgtctttactcactgtctgggtctgagttatcaaatacaagaaccactagtggctgggtgtggtggctcacgcctgtaatcctagcactttgggaggccaagatgggtggatcttctgaggtcaggagtttgagaccaacctggccaacacggtgaaaccccatctctactaaaaatacaaaaattagccgggcatggtggtgcgcacctgtaatcccagctactcggggctgaggcaggagaatcgcttgaacctgggaggcggaggttgcagtgagctgagatcgcgccattgcactccagcctgggcaacaagagtgaaactctgcttcgaaataaaataaaataaaggaaaagaaaaagaaaaaggaccactagccacatgtgactcattaaacttaaatgaagaaaaattaaataggccgggtgccatggctcccacctgtaatcccagcattttgggaggccaaagtgggtggattgcttgatgccaggagtttgagaccagcctggacaacatggcaaaaccccatctctactaaaaacacaaaaattagctgagtgtggtggtgcacacctgtagccttagctacatgggaggctgaggcatgagaattgctagaacccaggaggtggacactgcagtgacgtgagatcatgccacagcactacagcctgggcaacggggcgagactccatctcaaaaaaaaaaaaaagaaaagaaaaagaaaaattaaataaaatttaaaattctgctcctcaagtcacaccggccacatttccagtgtggctcatggtcagagtactgaaacccacatagcacacttccatcactgcagaaagttctgtggccagctctcccagcaacaaaggggccaggtcagtcttggtcactgccagggtcgagtacacagtatatgctcaataaatgctttctaaatgaagaagtggggcgggtgtggtggcttacacctgtaatcccaacactttgggaggccgaggtggacagatgacttgagcctgggtttttgagaccagcctgggcaatatagtgagaccccatctcaccaaaaaataccaaaattagccgggcatggtggtgcatgcctgtaatcccagctacttgggaggctgaggcaggattgcttgagcccaagaggcagaggttgcagtaagctgaaattgtgccactgcactccagcctgggtgatagaacaagactccgtctcaaaaaaaaaaaaaaaaaagaaaagaaaagaaagaaaaagcggtaaaatatatataacaaaaaaatttccataaaaaatatagacatgaaagagtgaagacatcaatggctcagaggccttgcagagactagaggtgctggccaatagcacagaggtcagcaggtgccatctgcagccacagtaccctggccactctcactccctgggcagccacgttagggtatccaaactctacatttccaacatagtgacatggaaagccagaaagcaaaagccacattgctgggctttgaacctggatctccctggctggccagcaaagcatcctctgggagctcttgctccagccccaagggcagaaacttggaaaaggcttccaggccacagccggagtcagctctgcagcgccaacatgctgactcagccaaaagtggaggacgggggagggacagaatggccggtccccccgccaggccccattgccagcctgggcccctgcc[137 bp omitted]tcccaggttcaatcgattctcctgcctcagcctcccgattagctgggattacaggtgcccaccaccatgcttggctattttttgtatttttagtagagacagggtttcaccatattggtcaggctggtcttgaactcctgacctcaggtgatccactcgcctcagcctcccaaagtgccaggattacatgcatgagcctccacacctggctgtaaatgcatttaatggatctggccacatcctctctgcaagatgcctgctggtctctccttcaagcgcatcctccccctctacacccaccagtccccaggaagggtgatcacagtctccccccaatcctcccctccttgctcatgactctgccatgtcccaataccccccattgattggatgatggatggagtctcactctgtcgctcaggctggagtgtagcgcggcaatctcagctcactgcaacctccgcttcctgggttcaagtgattctcccacttcagcctcctgagtagctggggttacaggtacatgccaccacacccagctaatttctgtatttttagtagagacggggtttcaccatgttggcaaggctggtcttgaactcctgacctcaaatgatccgccttgccttggccctccgaagtgctaggattacaggtgtgagccaccacacttggccccccgatttaatcattcatgtaggctgggcacggccagccttgggaggccaaggcaggaggatcgtttgagccagaacttaagatcaacctgggcaacaaagagagacccccgtctctaaaaaaaattaaaaattagctgggcatggcagtacatgtctgtactcccaactacttgggaggctgaggcaggaggattgcttgtgaccaggagtttgaggttgcaggtgagctaagatcccgccactaaacaccagcttgggtgacagagggaggccctgtctagaaacaacaactttcatgccactgtctcccgtcttttccttaaaccaatttacttaagaaactaattcaacagtatcgcatatctctaaggaagacccaaaagattctgccctgccttgaaagtcaccagaaacattgttacaatgaaaatagtacccagttatcccatggtcgctggatactgttgcgaacaccagcagccggatgggattttgttacaaagagattggcaggtgttagtgtctgagatcaccctgaatctccctgggctttcttccctgacgtgttaggagctgaaagggagtcattgctggtgtgtgcagctctgggctgccggatgcctcctccagaggccacccccaaacagcccc[136 bp omitted]acagtgaaaccccatctctactaaaaatacaaaaaaaaaaaaaaaaaaattagccaggtgtggtggcgggcgcctgtagtcccagctactcgggaggctgaggcaggagaatggtgtgaacccaggaggcagagcttgcagtgagccgagatggcaccactgcactccagcctgggcgacagagagagaccccgtctcaaaaacaaaaacaaaaacaaaaaaagacaacaacaacaaaaaaccgtggctcacaggaggcaggaagcccaagttctcttcccaagggagctgtgtgggcctgaaccagtcctcaccactctctgggactcagtttccccatctaagcaccagggaaaatgggctcttggtgcccggggctgatttttgtgggtctgaagtctgtaaagatcaaggaaaccgaggcacaaaccagggaggtctccaaggcagggcttggtgtagctcctaattcctcctggtccccgtgcacaagggtgggatctggttttggtcacagctgaaactccagcacctactgtgtgctagagctgtcttgagtgctggggacacagtacagatcaaggcagataacctctcagggcttctgttctggggagacagcgacagatggggatagaggacaggggcagaggacacagcacgtgtaaaggccccgaggtgggaacgaacacactaagttctggaaaaagagagggggactggtgcagagaggggggctggtccagagagcgggcagagtgagtgagcaggggcaggatttgaggggtaataggagtgaggaccacggtggctcacacctggaatcccagcactttgggagaccaaggcaggtggatcacttgaggtcagtagttcaagaccagcctggccaacatggtgaaaccctgtctctactaaaaatacaaaaaattagctgggtgtggtggtatgcgcctgtaatcccagctactcaggaggctgagacaggagaatcgcttgaacccgggatacggaggttactgtgagccaagatcacaccactgcactccagcctgggtgacacagcgagactctgtctcaaaaaataataataacaataaaataaacagaagcgcggagggctatggccctccatgccatgtcagcatttgaggaatgaaaaactgtcacaccccagtaatgattcgtctctcagcatccctctagcatttataaggcacctactgtataccaggctctgggctgagcactaaggacacaagatgactgtgggaggcagacagggggccctggaagttaaaggccaggtcttggccaggcgtggtagctcacacttgtaatcctaacacattgggaggccgaggcaggcagatcacaaggtcaggagtttgagaccagcctggccaacatggtgaaacctccatctctactaaaaaaaataagaaataaaaaaataaaaatagccaggcgtggtggcatatgcctgtaatcccagctacttgggaagctgaggcaggaggatcgcttgaatccaggaggtagaggttgcgagctgagatcacaccattgcactccagcctgggcgaaaagaaactctgtctcaaaaaaataaaataaaaatacaaaaattagccaggcatggtggtgcacgcctgtagtcccagctactcaggaagctaaggtgagagaatcacttgaacccgggaggtggaggttgcagtgagctgcgatcatgccactgctctcctgtctgggtgatagggggagactccgtttctaaaaacaaaaagcaaacaaaaagagatcagggctgtaatgggggatgtcgcaaggcttccaggaagaggtgatgtctaagatgagaaggatgggagaaattgcgctgggctggggcagggaggttggggagtgggaagggtgtcccaggtagaaggaacagcatatgccaaggtctggaggcaagagaggtgtggaagaggaaacctaactagccctgaacaaaacagaaaaggagagggtggggaccctgggccaggtcccatcccatgggagaggcaactgagggacatggggggctggtgagggggggtggggtggcagaacttcccactacccccccagagctcaggtgggggcatgacctctctaggtggctccccaagctctcaggtcctgggtaggagaaggtggtctctctgaacaggtgttaggatctacacccaaccccatctccccaagacataaaaacccctatcaagcacttagcaggagcaaaacactcagaactgagctgggcatacagcaggtgctcagtgagcacatcagctattattccaggcttttcccaccatccaggcacacttactaaattctcctcagaacagctattatttgccgagcatggtggctcatgcctgtgatccctgcactttgggaggctgagaaaggaggaccacttgaggccaggagttgaagaccaacttgggcaacacagcgagaccctgtctctacaaaaaaatacaaaaattagccaggcagggtgaggcatgcctgtggttgtagctactcaggaggctgaagcaggaggatcacttgagccttggaggtcgaggctgcagtgagctataatagtgccactgcactccagcctgggtgacagagaatgagaccctatctcagacaaacaaacaaaaaaatccttgtgcctagaagctggacacggtggctcatgcctctaatcccggcactttgggaggctgaagtggtaggacagcttgagcccaggagtttgaggctgcagtgagtgatgatcctgccactgcactccagcctgggtgacagagggagaccccgtctctgaaaaataaataaataaatatatatatatatatatattttttttttaaaggcaaattccaattagccgggcgtggtggcaggcacctgtggtcccagctacttgggaggc[137 bp omitted]attcctcatgcctggaacagagagaaccagcagcacaataggtacaaatacttgaggaagggagggagtccctctaatgctcccctggaagcaacctctgccattaccatctatctttgtgtctttttctcatgaagttattgatcaaaggtaactctagaatacagggtgattttttttttttttgagacggagtctcactctgtcacccaggctggagtacagcggcacaatctcagctcactgcaacctccgcttcctgggttccagtcattctcctgcctc[213 bp omitted]gatattctgttcgaatcatggctgttcctcacatgacttgtaactactgagcacacgcagcccaggcctcttctcgcctgtggtaggatcttccgtggcaaggctgtgccttgggcgtttatcacccaattccctgtggacacttcggttgcctccattttttcccaacctcacccaatgccatggtgaatctccatgctgacatctcccaggtccccttggggaagcatttttgtctctcactggtgtccagtgaagggcagctggggtggaaggtcgggttacagcttgttctaaacaagcaggttcccctcctacacagtcggaaatgagtaggtcctaatagtccccgaggagacaattggctattatcttccgaagttaagtttatacattccctttaggcctgataacaccacctctagaaatctacccggcagacactttcccgtgaaatgacacgtggagaaagtactcacggcaaaaggcttgaagcaacctgaatgtctatcgataggagattggttaagtaaagaacagtacaagggggccaggcacagtggctcacgcctgcaatcccagcactttgggaggctgaggcaggaagatcacctgaggtcaagaattcgagaccagcctggccaacatggcaaaactctgtctctactaaaaatacaaaaaaaattagccaggtgtggtggccggcacctgtaatcccagcaactcgggatgctgaggcaggagaattgcttgaactcaggaggcagaggctatagtgagctgagatcatgccattgcactctagcctggccaataaaagcgaaactccatttcaaaaatataaatacataaatgaatgaatgaataaataaataaaaataacagtacaagaggtcaaataatgatcgaagagattagtatcttagtgttatgagatcagtatctcttagtgttatgagatcagtatcacagctgtgaaaaggaatgagaataccagatgtacaattataaaattacttttaagatactatatttttaagtgggggggaagaaaacaaggtacagaacagcatgtagaagatgctgccatttggttaaacaagggaatataaatccagccgcctactaaatgttcacagaagatttctagataaactgcgctcttcaaaaccgtagccacgagccgtatgtggctgtttaaatttaaacggaataaaatggaataaaatttaaaattcagttcctcggttgcactggacacatttcaaacgctcaatagccacattcggctcagggcgactgtaccacggtgcgtagacggagaccatttttatcatcgccatatcgggggccaaatccggcccaccgtttgtttttataaataaagctttattggcacatagccacgcccaccagtttacgtgtttgtctatggctgctttcacgctccaatggcggggttgagtagtagacagagatcatccggccggcaaagctggaaagatttacaaggtggtcctttatggaaaaactctactgaccctgttctgggaagagactgctactggggaaagagagaggggagaggatctggagattctccaccatgcatttttctctgcatcctcaattgtatcccatgtgtacgcattctctggccagaacaacatattaaaaataaaagacgtggtgtcacagagatgccgatttcttctcctgccagccacgcccggagggcctggttcccctcgacgctgccaccctggataataccacacttcaaacagttttgctaaatggatgggtgagaaatgatatcttgttttaatttgcatctcctgggcaggagatgggaactctttaactatagataaatgcccgtctaatcatccatcgtccccccagactccttaagggcaaggattgtctgcatcagtcactatagtgtccccagtcccagcatggggccaagcaaacagctgaagcccagtacatccacacggaagagagggaatcaggcccagggcagcagccacagtgcaaggcctgggctagttgtggctggtggtgagcatcgagtgccaagccaagcttcaccgacgcagtcacaggggcagactccatgcggcagaggtggctgccagcccctcggggaacctgcagactcacgttcagcagtgggggaagagagcagggtgggcagggacctggcagccttgggggtaggggaactgtgggctccaggcggggagagagattatatattcatcagaatcttaaacaaaagccccgcagccgcctgtcagccaggctatggcttttatggtaatcagcaatgaattacccacaatgcctggccaagcgcaagtggttcttggcccggatcctaaactaatttttgtatgttcgtgtgtatataattttgctcgctccctcccgttcctctcccttcattaccaggagcacgggtggggtacggggcagggaggcaaaaggaaccctgggtgtagaagtggaggatgctcaccaagaccccctggccctacagcctgcctggcactaggccctgggctcagagtgtgtggaggtgggaggtgagtgccaagtgggaactgaggggagcctggaaaccaccaaaaactggagctggcagctccgggggtggagagagaagggaggaagggggggttggctggctctggtggtgagcagagtgtgcaggccccttagtggggttgagcctgtgccacgtgctgtgtggccttgggcaagtgccttaacctctctgggcttcagccccctggtctgcaaattagacctcccttcctgtcctaacctctagccccatccagccccaagtgtgtagcccacagcccctcccagggccctgtctatgcaggccactctctaagtgcttgacgcatattaactcgttttgttgtgccagttatttatctcagatggggaaactgaggctgaggataggatgtgccttgtccagagccaatggcttgcttgtagcacctgaaaacccgctatgggctaagtcaggagctgccaactccatgtctccagggagaaccagcccaccacttcctgggaacctccgcaggcgtcctgctaatgggggcgtttccatgcctgcctctctcaccatcttcgccacctcagctcatcttctccgtctttaccgatgttcaggacagaggcctgggagtcgttcttgactcatctcaaccctaccctgcagccaaccacttggagaagccagccaacccttctgcaaaatccttctagaatacaacccctcctctgcccctgcctggtccacccccatcatccctggcctggatctgtgccgtcccctctgctctggtcccccagcgtctgcactcatcccccacagtctgtcctttctgcaacagccaggggtcgcctgtgaacacgtcggtcagggctggttcctcctttgcccatagccctccctggctcccacctccctcagagtaaacgcccaagtcctcctggtgccccacaagggcctgcacaacctgctctgtcctctccctgctctcccctcccctcctccccctcctcactctgctccagccacacaggcctcctcgctgttcctccaacatgccaggtgcggtcctgcctcagggcctttgcacgggctgtgccctctgcctggaacaccctcccctcagatgtcagcaaacatcattctcttattcctgttggtcttactgaaatgtcacctcttctgtgaggcctgtcttgattctgtagctaaaacagcccctccctgccaccaaccaattcctctagcttttttcttttctttttttttttttttttgagatggagtcttactctatcacccaggctggactgcagtggcgcaatctcggctcactacaacctccgcttcccccgttcaagcaattctcctgcctcagcctaccgagtagctgggattacaggcgcccaccaccatacccagctaatttttgtatttttagtagagacagggtttcaccatgttggccaggctggtttcaaactcctgacctcaagtgatctgcccacctcggcctcccaaagtgctaaaattgcaggcatgagccactgcgcctggccaactttatttttcttaaaggcatggcatacagtcaatccttaacacatatttaatctattggctttatggcttttgttttttgggtgtttcttgtttttgttttttgaggcagggtctcactctgtcacccaggctggagtgcagtgacgcaatctcagctcactgcagccttgaactcctcagctcaagtgatcctcccacctcagcctcctgagtagctgggactataggcttgtaccaccacacccggctaatttttgtatttttatttattattattattatgaaaccaagtctcactttgtctccagactggcgtgcagtggcgtgatctcactgcaacctctgcctccctggttcaagcgattcccctgcctcagcctcccgagtagctgggactataggtgcatgccacca[138 bp omitted]agccttttgtatttttagtagagatgagatttcaccatgttggccaggctggtctcgaactcctgacctcaggcgatctgcccgtcttggcctcctaaagtgctgggattataggctgagccactgcgcccggcccctatttgttcattgtccttctgatgcattccacgagggaagggtttttccctctgtcttctccgtcactctgttcccaacacctgaccctgtgaggatcagggcctggtatataggaggtgctcaataagtatccagtgatggagctctaggcccccagcagggtcctgggcccagaaaggacacgacggttgttttctgaacacacagaagctttccttggggtctgaaggaaaattttagacctgaaaccatcccctgggtggaggctgggggtggggatataagtatcttgggagcagccaaggaaagaaaaagaacattcctgtctcatcaaagctgttcaggggagacccgagctccctggctggcggctggggtggagatggcagatgctctctgcag[227 bp omitted]gaggcaggagaatggcgtgaacccgggaggcggagcttgcagtgagccgagatcgtgcgccactgcattccagcctgggagacacagcgagactccgtctcaaaaaaaaaaaaaagaaagaaatacgcatcccacatgacatctcctggttgtgcgtgaggcctgtgtgtgaacgagccctgcaacacatctcataggaaagcaaaagagagagacaaatgggcatgtccgtcaggaggggctgggcatgtagatggcatactacacagccctgaaaaagaatgcatagtacgcagccctgaaaaagacatccctggctgtgtgcgtcctggtactgtcagtgaaagagcatggcagggacagcgggcataggatgtgtgggacgagaaggtgagcacaatatgccaatatttgcaaatgctataataatagcagcagggccaggcatggtggctcacacctgtaccctagtgctttgggaggttgaggcaggaggattgcttgagcccaggagttcgagaccagcctggccaacataatgagaccttacctctacaaaaaaatacaaaaattagccaggcgtggtggcgcatgcctgtagtcccagccacttgagaggccaaggcaggaggactgcttgagcctaggagatggaggcggcagtgagctatgatcacaccactgcacttcagtctgggcgacagagcaagaccctgtctctaaaaaaattaaaaataaaaataaaataatagcaatagtaacaataactgctaatatttataggtcacatactgcgtgccaggcatggttcaaagtcttttacacataatatctcattgaattcgaattgtctccattttacagatgaggcaactgagcatcggagaggtcaagacacttgtccaaggtcacacagcatggcggcagcagaggggggacatgagtccaggctgctgagccccaaaacctggcctaggatttatttatttatttagacagagtctcactctgtcgcccaggctggagtgcagaggcacgatctcggctgactgcaacctccacctcctgggttcaagcgattctcctgcctcagcctcccaagtagctggaataacaggcgcacgccaccaactccagctaatttttttgtatttttagcagagacagggtttcaccatgttggccaggctggtctcaaactcctggcctcaggtgatccgcccgactcagcctcccaaagtgctgggatgacaggcatgagccaccgtgcccggtcctggcctgggatttggtgacaacgctcgctgacagcctacgcctgatccctggtaaaaacagcagacgcctaataagtgccctggagatgctcaagggcaaagtgagcagagacaggggtgtacccaggaggagatggtgagacttaagagagtggtccattgcacagggatgggttggacaatgctctctggggaatccacgcagtcagcacacacgcataggaaaccgggtgctggggagcgaggcggctggctcgtcggaaaacaaatcgctgccagtctcatttcctcctgtgacagagatgggcaggcctggccggggccgacggctggcactgagccagagtcaacggggacctccctacctgtctccgtgtgatgtgtttatcaagaggacgggaaatgtcacgaccatcaagggcaggcggcaggaggggctggtgtgggcgcttcttagatggagtggggagggcctggcccaaggtcaaggtggcccctggagagccttttctccttcctgcctcagcggaaccaacccaccgttcaatccatgcttaagaagaaaccctgcaacgtggttctaagaccacaggtttgctgggcacgcagtggctcacacctgtaatcccagcattttgggagcctgaggcaggcggactgcttgagcccagcagttcaagaccagcctgggcaacacagcaagactctctctctctctccacaaataataataataataataataataataataaataaaagtaaaaaaattagccaggcatggtggcgtgtgtctgtagtcccagctactcagtgggctaaggtggaaggatcgcttgagcccaggaggtcgaggctgcagtgagctacaatcacagccactgcattccagcctgggcaacagagcaagatcctgtctctatcaatcaatcgagaccacagcttcagctgagttcagtgccagtctctgctccttgaacactgtgtgaccttaagcatgtcatttcccttccatgaacctcagtaagatagagtcgtgacctccctgacttggatcaaccttctgagtcatgctgagcagcacgaactttggattcaaagcaacccagagtctgcatcatgatttggcctcctcttagctgtgcagcctcaggtataaatggctcaatctctctggatctgcttatcttgtttgagcccctggatccaactatgcctgaaggtggtccattctaacatcagcctttttggttcaagagccaatcaactccccagcttttcactaatgtcagtttgatgtgggtttctccacctttcttatttatttatttatttaaaaaaaaattttttttttttgaaacagcatttcactatgttgcccaggctggtcttgaactcctaggctcatgtgatcctcctgccttggcctcccaaagtgcctgggattacaggcatgaatcaccacacccagctgtttctccacatttcaagttgtttctccacctttcaagtccactttgtgcctgaggacagagccttgttagtagccagggcagagagctgaagattcgagacatcacaggttatccctgctcaacaggggcttcagatcaggggcttagatcaggggcttcagatgaacctcaaacctctgacccttggatcattcagaacgtggttgctggaaagcaacacccacatggcgtcattcagatttgggactgaggacagttcccaccaactgaatatctaccatgatgcatttagcgagcacctactatgcactaggcccagtgcaggccacaaagtgaaacaactgatgcttcacaaagaccttgtgtgggaagcttttgcccatgctgttccatctgcctagaacacacttccctcccctcactgcccagttaactccttctctaccttcacttcttagatcagccaccgccacctcctccaggaagccttccctgacttttcctcccatcactcacgcccagagcctcccattctctattcccctcccttatcaatctccagcaatttccatattttattgcaaaagtagaaataaaaaaccctgccacttaaa[138 bp omitted]ccttgacctcctggcctcaagcaattctcttgcctcagcctcccgagtagctgtggccacaggtgtacaccatcatacttggctaatttttaaaatttttttcagagatggggtcttgctatgttgccctgcctgatctggaactccaggccccaagcgatcctcccacctcagcctcctgagtagctgggacaataggcaaatgccatcacacctggctagttttttgcagagatggcgtcttgctatgttgccccacctgatctggaactcctggacccaagcaatcctcccatttcagccttctgaggagctcggaacacaggcacacgccatcacacctagctaattttttttttaactttttgcagagatggggtcttgctatgctgccctgcctgatctggaactcctggccccaagcgatcctcccacctcagcctcctgcgtagctgggaccacagctgtacgccattacacctagttaattttttaaaaaatttgcacagatctggggccggggtggggggtggtcctatcttatcctgcctagtctagagctcctggcctcaagcgatccctcccacctcagcctcctcagtagctggggccacaggcacacaccatcacacctggctaatttttaaaattttctgtagagacagggtctt[131 bp omitted]tgaacacttttctttcctgaactacatacgtaaatggaaaatgtaagtcaaataaatggttcatgtttcctgaaaagtcctgtgtcccgagtccagctctcctgaatgcctcttgccccagatttgctgattgggtttttttttctttctttcttttttcttttgagacggagtctcgctctgtcaccgaggctggagtgtggtgctgtgatcttggctcaccgcaacctcggcctcccgggttcaagcaattctcctgcctgagccttccaagtagttgggaccacagactcacgccaccacgcccggctaatttttttatttttagtagagaagagttttcaccatgttggccaggccggtctccaactcctgacctcaactgatccacccgccttggcctcccaaagtgctgggattacaggcatgagccaccgcgcctggcctaattttcgtatttttaatggaggcggggtttcaccaggttggccaggctggtctcgaactcctgagctcaggtgatccacctgcctcagtctcccaaagtgctgggattacaggcatgagccaccacacccggctgtgatttggggttctggcacccggctgtgatttggggttctgcacacatagcactgttgcttgcactcccaggcaccggggacctggcttctcccacgggcggctgccccactgccccgggattttcctcctagccacgctgagacgtctgttctgagggatccacgaaggataccaactatagctggggctcctgctcaccctcccatggcccaaacatcagggtttgtcaactcacactttgagggctggagtggccatggcgggacattaggaagaaccactctacccaaaacaatgcctcatgcatagcaggcactgagaaaatattacttgggtaaacaaataaatagctgagcctggccaggcgcagtggctcatgcctataatctcggcactttgggagggagaggtgggtggattacttgaggtcaagagttcgagaccagcccggccaacatggggaaaccccatctctagtaaaaatacaaaaattagccaggcgtggtggcacgcgcctgtaatcccaactactcgggaggctgaggcaggagaatcacttgaacctgggaggtggaggttgcagtgagtcgagattgtgccactgcaccccagactgggagacagagcaagactgtctcaaaaacaaaaaacacaaaacattgcacaggaaatgagcaatcagagaggttgggcaatggccgcaaaatcacacagctaggaaagaggtgacggcaggatttgaatccaggactaacagaatcctagattttccactggtccaggtggctactgacagcacaaattttcctaaaataggacagggcagggcagggcccaagcaaacatctcaaataagagaacccaaactcacatagatctttaaagtaagagggtggggtgtgtggcccacctagaaattagtaaggggccaggtgcagtggttcatgcctgtaatcccagcactgaggctgagacaggtggatcacctgcactcaggagttcgggaccaccctggccaacatggtgaaaccccgtctccattaaaaatatgaaaattaggccaggcgcagtggctcacgcctgcaatcccagcacgttgggatgcc[134 bp omitted]gaggcaggagagtgacgtgaacctaggaggtggaggttgcagtgagccgagatcacgccactgcactccagcctaggcaacagagcgagactccgtctccaaaaaaaaaaaaaatgaaaattagccaagtgtggtggcgcttgcctgtagtcccagctactctagaggctgaggcaggaaaatcgcttgaacccaggaggcggaggttgcagtgagcaagattgtgccactgcattccagcctgggcaacaaggtgagactgtctcaaaaaaaaaaaaaagaagaagaagaaatgatggaatgatgaccgtgaaatgctgcgagacggaatgaggacaggacagaacaggctgcaccccagctaggtccaacagcaaggcagtctggccatgctgtgtgaccctgggcaggtgactcgactctctaggcctcagtttcctcatctgtaaaatgggtataaaagtctcttcctcccctcacatggctgctgtgaagactgaatcgaaaggcacacagagctgttcacaccacctgagaagcagctgatagactgcagatattatcttggtggtggttgttattatttgtttttattttgaaagacagggtctcgctctgtcacccagactggagtacaatggtgagatcacagctcactgcagcctcaaactcctgggctcaagtgatcctcccgtctcaacctcccaaagtgctgggattacaggcatgagccattgggcccagctgatgttatttttaaaaaagtttttcctggcctaggctgtcagggtgtctagcaccctattccccttgaattgctaagtgagaggcccacactgcaatctcttgatctgtttgtattctccatttaacagacagtgagtccctggagggcaagggcctggcctgccctcccctccatatttgtccctgaaattctgagttctggaaacttctaatggaaggatcgaagagaaagcatcagctcagcctggccactaaccccagacatggaaagaaaaaaaggagggatactctaccttcaaaagccatcccaaggccgggcgcagtggctcacatctgggatcccagcactttgggaagccaaggtgggcagatcacccgaggtcaggagctcgagaccagcctgaccaacatggcaaaacccatcactactaaaaattaaaaaattagccatgcgtggtggtgtgcgcctgtagttccagctacttgggaggctgaggtagaaggatcacttgagcccaggaggtggaggttgcagtgagctaagattgcactgcaccactgcagtccagcctggacgacagagccagaccttgtcttttttttttttttttttttaaaaagctatcccaaatccacttgcttcttctccccaccacccacctttgccttcacctggtccatccctggcatcaaccatgagtatctgagtcaggtcctgtccctcctctgcccacagccctccatagctcccacctctctagggctcaaagcccagggttctccctgcagcccacaagaccctacatgacctattgcctcctctcccctccccatcactcactgggctccagccacacaggcctcctcgctgttcctccaacacgccaggcgtggtcctgccccggggccttggcacacgctgtgccgtctgcctggaatgctcttcccccacgttatctgcttggttcctcctcacctccatcagggctttgctcaaacatcacctcctcaatgaagccgtccctacagccccattaaaaatgacaaccctcatgcctccctcccgagtcccctttgttcctttactgctttctctgatcacccctgacgtgctatatatcgtattttgcctatcatctctctccctgatccacaaagccatcccctttattgcttcagggtcccggcacagagcctggtggacaggaggcatctgagaaatccccccagatgatggaaagcgcaaaatcggaggcagtggctgcggccaaagcagccgctgagaccccggaggctgacggcggaagcctccacgcctactccagccggggccttcctgtccctgttggcaagccaggcccctgccctctgccatccggcggctcaacacctgttgtgacacagcaggaagcaggggcggcagccagtgcccgtggccttggctggacaggtccctccggcaggtttaatccctgccccagtgggagagggggtacacggaccttgaagccaaacacacaggctgacacaagcaccatccacttggcttatccggctcccgggaagtggccagtgtagggacaagcctgataaacatctagcaaataaatggattttttcttttttaattgagacggagttcgctctgtcccccaggctggagtgcagtggtgtgatcttggctcactgcaaactctgcctcaaacgattctcctgcctcagcctcccaagtagctgggattacaggtgcacgccaccatgctgggctctcatttttgtatctttttagtaaagatggggtttcgccatg[137 bp omitted]ccagccctgatttgagggcttcaccctatgaactcactagatcctcccaagggagcctggatggttgaggttatcattatcctcattttccagatgaggaaactgaggcccagagaggtggagtcattgctactaagggacagagccatctggccctagaatctggttttggccactaatcaacacagtctcaacgaatgagaagaataaaacaagggcccggtgctggctcatgcctgtaatcccagcactgtgggaggctgaggcaggaggaccacttcagcccaggagttcgagaccagcctggacaacataacaagaccttgtctctacaaaaaattaaacaacaacaaaaaaattagccaggcatggtggtgtgcacctatagtcccagctgctcagggggctgaggcaggagggtcaactgagcctgggaggttgaggctgcagtgagctatgatcatgccactgtactccagcctgggcaacagagcaagaccctgtctcaacaaagaaaaataaaaagaataaatcaaggtaacagggaaatgtgagtcacgtctacggagcattccgacctggggaaaagggcagctatgcttcatctccctgatgtctcccgacccagtgacatgggcccattttagggatgaggaaaactgagtccctcaagggggaagcgatttcctgaaggatctaccgcctagaagtggcaggctcagagctaatgctaaattcactaaaccctgacccagatcgactacagggtcattttgtagaggcctcagtgctgtaaggagtttggctcgtgcctcgtgagtacccactgtgtgccaggcccagagtggagaagcctcagatgtctcatttccagacaggtaaactgagactgagaagttcagctatttgcccaagccctgagatgtccccattttacaaacaggtaaactgaggctcagagaaagaaccatttatccaagcgccaaaattgtctccatttccagatgggtaaactgaggctgggaagttcagctatttgcccaagccctgagatgtcctcattttacaaacaggtaaaccgaggcttggagaaatagaaccatttatccaagccccaaaactgtcttcatttccacataggtaagctgaggctgagttcagctatttgcccaaaccctgagatgtccccatttcacaaataaactgaggctcagagaaatttaaccatttatccaaaccctgaaattgtccccatttccatttgggtaaactgaggctcagagaggtttcaacagttgccagaggtcacacagccggcaagaggcagcactgagcctcaaatctgaggtttcctgacctgacagggaactgcaggccccacggtccccgcctgagctggcgtgagcctttagcggaagccctccccagctctgcacagcagacaccctcgcggccgtgccttgctggagtatccacagtgacacacagccctgttggtggctgggctttttcaggcttaaaagggaggtaatatcacctaacaccagctatatttttaaaaaccccacagcactcaggaggctggcccgtcagcgcagcaccacgtccgtgggcaggcagaggccccggaactcgaggacgtggctattttaaaggggctatttctggaggctgaggtgagaatgcgggggtgggaggaagaagcagccgcggggaccgactcgagcccgccccgactggccgactcccgggttgggggtggttaaaagcaagaacgtggaagccacctgctccccgcaagcactgcctccagcccgcagaaagacctcaggcggccgggcgcggtgctcatgcctgtcatcccagcactttaggaggctgaggcgggcggatcacctgaggcagggagttcgagaccagcctgaccaacatggtgaaaccctgcctctactaaaaatacaaaattagccgggcatggtggcgcacgcctataatcccagctattcgagaggctgaggcaggagaatcgcttgaacccgggaggtggaggttgcagtgagccaagatcgtaccattgcactcaagcctgggcaacaagagcaaaactccgtctcaaaaaaaaaaaaaaaaaaaaagaagaagaagaagaagaaaaagaaaaaacagacctcatgcatttcagagcctcatttcttcccctgggaagagctgcttaggcaaaatgtatgcctggagccctactgtgtgcagatgctgccatggacatggtagaggaggagagaagcagataatgagtatgaagcattcgaggctgggagaggtggctcacgcctctaatcctggcactttgggaggccgaggagggcagatcatttgaggtcaggagtttgagaccagcctgaccaacatggcaaaaccccatttctactaaaaatacagaaaaattagctgggcatggtggcacatgcctgtaatcccagctactcaggaggctgaggcaggagaattgcttcaatccgggaggcagaggttgcatgaaccaagatcacaccactgcactcccgcctgggtgacagagtgaaactccgtctcaaaaaaacaaacaaaaaagcattcaacagagaaatggtggcaagggctttgagtcaaagagagcagaagggggaagacaggaaactaggtggtggggcaggctgcaagtttaaatagggtgatcggggaggcctcatttaaaagtgacctgagacgtgaaggaagtcagggaggttgctgtttggggaaaagcattccaggcagagggcacagactgtgcaaaggccctggggcgggaccatgcctggtgtattggaggaacagcgaggaggcccgtgtggctggaacagagtgaggacggggagagaggaaggaggggacggcagggaagggatggagcaggttgtgcaaggcctggtgggctacagggaggacttggggttttcccccaagaggtgagagccatagagggctataggcagaggagggatgggacctgactcaagaactgaaagatgtcattgtgggaagacagactgtgggaatgagggctggggtcacaccagagcagaggtgaccgtgttggtccaggtgatgatgggagctggaccaggtggaggcagaggatagaacaaaaatgaaaaaatgaaggccacgtgcagtggctcatgcctgtaataccagcactttgggaggccaaggtgggtggaatgcttaagctcagaagttcaaaaccagcctggccaacatggtgaaaccccatctctacaaaaaatacaaaaatcagccagcatggtggcacgtgcctgtcattccagctactcgggaggctgaggcaggagaatcgcttgaacctgagacagaggctgtggtgagccaagattatgccactgcactccagcctgggagacagagcgaaaccctgcctcaaaaaaaaaaaaaaaaaaaaaaaaagaaagaaaaaaagggaaagcaagctggcctgtgtacagtactcagcgcacagtccggcacacagcaagtgctcagcatacattggcttgtattatttttagggtcttaggctctgtactctgaacctgaaacccgcttcccctggcaggacccaggagaagacagtgacccctgtgcctgggagcattttgtgtatggaaggggacacagttttcactctcatgtccctattggcctgtcccaggctggcggcagctgatcagaccagggccagatctgatggttgcaatggaggaggagaggagaaggaggtagtgacccatgggttaaaggggggaggcccccaggtgtgtcaggatgcagccctgccacaaagcgtggggtcagcccaatcctaactcaactctacttgctgtgtgaccctgcacaagtcacatcccctctctgagcctcggtttccttatctgcgaaagtggggcagtggttgcaggcttctcacagggctgtgcagattcaacaggaccacgaggcactcagctagaggtgggatccgtgtcagcacccatcatgcttggtcgttcaccatcatccccatcctcacactgtttgcaaaacttcgagtctggggtctctggagcacaggggcaagaagagccacatccccaggagagccacatccccagaaggtgtcccaaggttcatgttctgccaccgtttggatccagttgaattgcaaatgccagaaaaagcacaaataaggaatgatttctcttttcacctaagggaagctgccaggttggccattcagggttattttcccctccccgacaatcactggggcccaggccccttccacctctttgatcccccattcttatctatgacacctgcctcatggtccaaaatggctgcctgagcacctgccatcatctccatattccagctgacaggtagagaggagcatgtgccacttctcttgaaaggcatttccagaaaatcctgcttatttacgccatgggtcagcattgaatcatatggcacagacagctgcaaggtgcactgagaaatgttttctttcccccaggtggccatgtgcccagataaaaattgtaaagttcaactgctacggagtcgggggatatgatgggatattgggagatcccgccacaatatctcatgtgggccatggggccaggtcttgggtctcaaaccagcgcatctgagacattttaacctggaaagagaagagagacgtcatcggggccggccccctgcctccacaccacgacggtttcactcattccaacatccacctcccaaaagactccaaggtcagaagcagtggccacgacccaagcacaggctctgcccaaggcgtccccaaggacaggcccccaccggcaatctgtgctccccaagcactggggctgagccaccaagcacccccattcagcctccttcctgcctgccgaggacaccggccaattcatctccttctcctcagtaaacaactgtcagggaaaataaatagtttttaataggctcattaattgaattcaggaagaaatcaccttctccccaggccatggggaagcaacgctcagttcaagaaattcaggccgaaggcagaaggggctcagcctcccagaaagtccaggagatgccccaaacagttgtagtcacattcaataacactgggacaggcatggtggctcatgcctgtaatcccagcacctggggaggctggggcaggcagatcacttgaggtcaggagttcgaaaccagcctggccaacatggtgaaacgctgtcactaccaaaaatacaaaaattagccgtatgtggtgacacacgcctgtaatcccagcatctcgggaggctgaggcaggagaatcgcttgaacccgggaggtgggggttgcagtgagccgagatcgggccattgcactccagcctgggcgacagagtgagactccatctcaagaaaacaaaacaaaatactgactcaaccagcaagggggtcattctgtgctgggcttaaggctaaaagcctcaggtgggtgctaggatgtcttaaacacctcaggggtgctcaggcttcagctttcagcctggaacagacagaggcaaaagcagcaagaatttaatgcccttgttttgctctcaccacatttatttttaaggttgtaccttcaaggacataccaggtttccgttcacaagagcaagacaaagttttctcttttacgttttaaaagagaatgggtttaaacaaaacgtgtcaagtactggctgggcacggtggctcgtgcctgtaatcccagcgctttgcgaggctgaggcgggaggatcgcctgagcccaggagcttggggctgcagtgagctatgatcgtgccactgcactccagcctgggtgacagagtgagatgctgtcaaaagaaaaagaaagaaaaaaaaaagaaacgaagaaaagaaaggaagagaagagaaagagaaaatgagggagaaggaaggagaaagaagggaagagaaggaaggaaggagggagggagggagggaggatagaagtaaagaaagaacaagagagaaagaaagaaaaaggaaggaaggaaggaaagaaggaatgaagcaagcaagctagctagtccttaggcgatggggcagcaaaacaccagatatagagtccaaagaccctgcagagtgacctcggcacagacctagagagtcacaactgaccctccacacctgctgagggttctgtccacattgacgtgactcagtttccccactgaggctgaggtggtccaagggtagccccgctcgcactcccagcccagctcctgccagcgtggcagcctgccctgcgactcggtctgcgcagggcttgccgtaggtgcccgccaatctgctctccgcactgcagtgggcacactccaagcgcaactcaataccccggacacagcgactccccagcgcccccaagccccatatgcaggtcctgcgaccttgcttccagagggcactgatcatcaagctgtattttatgatatcttagccagtttggggcttactccaagcgtgtttagcatagatccttccaataccaagacccttctacccaagagacagcctcacccccattttgcagacgagaaaactgaggccctggagggtgaaaccactgccccagggtcacactgaacaagcagctcagacatgattcaaacttgcaccattcaaatgctaaacccgatcccccaaagatcccctggcccattcctggtgagctcctcagtaacttctccacctgtctggccagacacacagggtgcccaacatccatcaggcctggctcagttctttttgtttttagagacagggtctcgctctgttacccagagtgcaatggggcatgatcatagctcactgcagcctcaaactcctgggctcaagcaatcctcccacctcagcctcctgagtagctgggattacaggtgcacaccaccacacccggctaatttttttactttttatagagatggggtcttcctatgttgcccaggttggactcgatctcctagcctcaagcaatcctcccatctcagcctcccaaagtattgggattacagccatgagtcaccatgcccgggtactggttgactcttaaaatcatctggcccaaccactgtacactttctgggggtccccagaccctttgggcctctcaccttctcctcaggagacaagaaatctcacagactgttttagagttccctgacctcctgacactggtcctcagacccctggcttgaagccaattactcagagacatcaccctcaaagccattccttaccacttcttttgtttttttttgtttttgttttgagacagagtctcactctattgcccaggctggagtgcaatggcacaatcttggctcactgcaacctctgcctcccgggttcaagcgattctcctgacttaacctcctgagtagctgggattactggcacacaccaccacggccagctgtatttttagtagagactgggtttcaccatgttggccaggttggtctcaaactcctgacctcaggtgatccaccagtctcggcctcccaaagcgctgggattacaggcgtgcaccaccacagctggctgtatttttagtagaaaaggggtttcaccatgttgctcaggctggtctcgaactcctgacctcaggtgatccacctgcctcagcctcccaaagtgttgggattataggcgtgaaccaccgcgcccggcccttaccacttcttgccagacactacggatattcatcagctcagagagggtgagcaagtagctgagagcacacagcatttccgctgggaacccagtctcctggcctccctgcccaagggcagagtgagctgagctttaatcccagcactttgggaggctgagacaggtggatcacctgaggacaggagttcaagaccagcctggccaacatggtgaaacccagtctctactaaaaatacagccagccatggtggtgcgtgccagtaatcccagctactcaggaggttgaggtcactgtggctgcctctccctgcaacatcacccactccgagtactctcagagcaggaccagggggctcttgctgtgagctgccgaggcagggctttccccatcattacctgcctgatcaaggtcattagacgtggcaatgctggtacacgcaggccaggcggtagctcccaggagccagacgggctgatctggaggggcgggtgaggtgtggcggagcttaggtcctaaaggggttgcagacagagcgatatcgtgagggaaaacaaaacggggtgcgggaggcaatggcggggtaggggtggcctggccagaaacagagctcccggcagagcaaggacaaaggcctggaggtggaaacaggagaaggataggtctacatggagtggaacggacaaaggggaggggaagaggaggagagatgaggccagcggcccacagagaggagtctgagggtgccatccagagagggaaagtgacttccccgaagtcacacagctcgtaaggggcaaaaacacatcctggccgataacatctttgctcccagccactgtgggaagtggcctctggctacatcgtagctaacaatccagctacagaattgcagcccccagtgcaaaatgaaaccgtggggttttccttgtttaaaaattattaaggccgggcacagtggctcacgcctggaatcctagcactttgggaggctgaggcgggcagatcacgaggtcaggagatcaagaccatcctggctaacacagtgaaactctgtctctactaaaaatacaaaaaattagccgggtgtaatagtgggcgcctgtagtcccagctattggggaagctgaggcaggagaatggcgtgaacccgggaggtggagctggcagtgagctgagatcatgccactgcactccagcctgggcaacagagcaacactccatctcctaaaaaaaaaaaaaaattaagaatttccaggtcgggcatggtggctcacgcctgggatcccagcactttgagaggccgaggtgtgtggatcacctgatctcaggagttcaacaccagtctggccaacatgctgaaactctgtctctaccaaaaatacaaaaactagccgccgagcatggtggcacatgcctataatcccagctacctggaaggctgaggcagaatctcttgaccccaggaggtggaagt[132 bp omitted]cccttctgatcgtgggcccccgagtgactgcagggcccccgtgaagctgggcctgggtgcagcctccaggagtgtagaaacgacatcctgtccagaaacaacgcctctgtaaacctgagaaagggcttgtcattcccagttctcacccttcctttgtgcctcagtttccccatccgcaagacaaggggacacctgccacctctcagggcagttctgaggaggaaatgagaaaacacagggccaggcacactggtactggtggcggagcattagcggcccccaccacgggggactttccgcccgcttgggttagttctcctctgttgcagctgtttggagaatgtgggtttgaggttccaacctcatcacccctaacggttcacgaagctgtggggagagagggtagactcatccagctcctcctgtgcaccttgggctcctggccccgttatcaatgtgacaccactgaattcccagtgatgcagcaggcaagactcgtccccatttcacagatgagaaaactgaggctcaggggaaggaaataatgaggtcatctcacacagccagggagggtctttgtcaggatccgaacctggggcgttcagacccctaatgcccttccccagcagggccggagtctgggctcccagggccagatggggccaagagaaaaagtcctgggacctggcagcctctctgcaccctgctgatatctgggagttgaagccagcactgttgccggaaaccccggcagttcacactctctagaattcatccgacaggggcaattacccacttccaataatcaatggggcagtggaaccaggacagatgtgcagagggaacccattagcaatctaagcgttctggccccgcgagacgtcagggagcgtgttgggtggacgctcagggacaaaggcaccatctgcctgatttctctcgctgtcttgggtcttcagcataagtcagggcttctttttttaaaaaaaaaaaaaaaaaaaaaagagaaggccttgctctgttgcccaggctggagtggagtgatgcaatcatagctcactgcagcctcaaactcttaggctcaagcaatcctcccacctcagcctccccagtagctgggaccgtacgtgtgcaccccaaccctcggctgatttttttttgttttttgtagagatgaggtctcactgtgttgcccagtctgatcttgaactcctaggctcaagcaatcctcccgctttaacctcccaaagtgttgggattatggacgtgagccaccatgcctggcaaaatcagggtttctaaacctcagcacagtgtacatgagggtggggtcattatctgggatggggtcatcctggccattacacagagttgagcagcatctctggcttccacctactccataccagcagcacccccctggacatgacacccaaaaatgtccccagacgttgccaagtgtgcccaggggagcaaaagtgaccccggctgagaaccacagcagtacactcaacgagtaatactggtaacccgggtgctccagccccaagagcaaacgactgcgctacagaaagaacgagggatggagaagcaggtcctgccgccagtagataattcgcagccctgccccgcgggacagccggcttccttctacgcagtatttaatttaagtcaagtttatcattatgaccaatattaatataatcagagccaacgtttatcgagcgcggacgctggcccaggccctgttctcagcactctctgtaagctatcacactggtgcctctaaagaaccgcagaggtggctgggagtcttaaacccatttcacaggcctggaaactgaggcccgcggacggcaatggaggtgtcagaagtcacgcaacttttaattgttggggaaggggtcaaagtccacggtggccctggatttctgtactgtgccatgttaagatgtttcaacccaaggatgttaaaatagggcaatttttttttttttttagacagagtctcactctatcgcccaggctggagtgcaagtggcatgatctcagctcactgcaacctccgcctcccaggttcaagcgattctcctgtctcagcctcccaagtagctgcgattacaggtatgcaccaccatgcccagattatttttgtatttttagtagaggcggggtttcaccatgtt[133 bp omitted]tttccttggaaaaaccaacagatctggccctggagccattcagggcttccttggaggttgaagaagcctttttggcccatacgacccgctggagtggagactccagccctgacaggcgttatggcttgagaatcacacacccgccatggcttcctgcctcggtttctccctttggactggtgaaaggggtccctgtccatcctcctgcgcaaggcccagcagcaggcaggcaggcatggctgtgtggtcttgggcaagttgctctccctctctgggccttggcctgacagatgttccaagaagcattcccaacattccaggttttctgttgatcctgatgttggcagcccagctctgggggctttcagagaactctgaccgcacatctaaaaaatgcaatttgttagacgcggtggctcacgcctgtaatcccggcactttgggaggccaaggcaggcggatcacttgatgtcaggagtttgagaccagcctggccaatggggtaaaaccccatctctaccaaaaatacagaaattagccagatgtggtggcgggtgcctgtaatcccagctactcgggaggctgaggcaggagaaccacttgaacccgggaggcggagattgcagtgagctgagatcacgccgttgcactccagcctggcgacagagcaagactgtctcaaataaataaaataaaataaaaaataaataaaaaatgccaattcgccaggtgtggtggctcacacctggaatcccagcattttccgaggccaaggcaggcagatagcttgaacccaggagtttgagaccagcctgagcaatatggtgaaacccatctctacaaaaaaaaaataaataaataataataataataataataataatacaaaagtcagctgggcgtgctggtggatgcctatagtccccagctacttgggaggctgaggtgggaggattgcttgagcccaggagttaagacactgcagtgagccattatggcatcactgcactccagcctgagcaacagtgtgagtcctgtcacacacacacacacacacacacaatgcgattcgaactccttggggtggggggtcctgtgtggtcttccccagctaaagtcaactcttctcttcttgtttccgcccccctcacctccagccacaaagcagcaggtgccactctcagtctctgtccttggtgccccccacaccagttcatctgtctccacttatgatagaggcaatgtcaaagcacccattttacagatcaggaaactgaggcacagaacagctttattactagcccaagccccacagctgcttagattctggcttccaagttccttagcagcaggtttccagcaatcctgatggaatgaatgaattaatgaactggtgaatattcgaatgaatgcatgcatgctcgctcgcacaccatgcttgtcaaccgatcactttcctgagtgcccatcaaatgactgctgttaaacccccaaatcccccccaaactcccccctttggtgatcactcgggcccaccaggggctctggaagttgggagccacatgtggagtccctggagtgcctggagctcccaaggcagccacgtgtcctccctgtccaccatccaggccccctgtggttcagctcccgccagtcgcccagtcctgccgcagaagtggggcggccttgattaagcagccagtgaaggggaacgccccagtttgcagtggctgagtcatcctgacatctccctggtgctggaccccatcggggggctgagggcggggtagcggggcgcgggtggacactggagagcccctcttgggcaggtccttcaacatatcagtgtagctcccatgttgtcaaaaataataacaaaaacagaatagaggtggcagctacattctaggtgccgttctgaatctgtgcttacacacgttaactcatttcttcctcctaacaatccctcaaggtgggcactgttactcttctccatagacagatgaggaagacggaagcacagagaggttgagcaacttgccccaggtcacacagccaacaagtcggcagagccgggatttgaaccccatgcagcctcagtccagcatccttgctcttaacctctgagaaaaggcagtcaagagccctggggtgtgtgtgtgcggggggtgtctctgtagcgattcaggtggcccccgcagcagatggactgctgtccaaacaaacatccctgacaatcgggcagagctccttccaggcgttaggaatccaggttgtggcagccaacagcttgtgggctgtgtgaagtgacctcaggccagtgaaggcccctccctgtgcctcagtttccctctctgcaaaatagggctcagatcacagcaactccgctgacaggggacggcaggttggaggagacaaggatgctactgacttgcttacttagcagagggcctggcacggggcgccaactctaaatagtcggagcagctgttattatccccccgacatcccctcatttgctgatcacgggggttaattataagcggcattaaattatacacacacagacgcgccaacctcgcttccccagaacccctgaatttccgcaaactctcaattacccacgtgacagcgcgacgatgggccatcctcccagcctctctccccacagcctgcctcatccgagggtcccaggcttccagagccatggcttctccgcccgccggatacccctctgggtgtccaggagcggaaggaaggatgcatgcgactgactgcggacgcgttgagagccaggggaggcatgtttacccacagcatctcatgtcaaggctcgccgcgacgcagactgcgactgtactgatcttagagatgagagaacacagagaggtcaggcaacccgccctagtttgcacagctcaagtgaggagggtggctcaagtcagggctctgacctggaacccagaggggtaacctcattctgtaagtgaggaagctcctgcacggagaactgaaagggaagaggggaagtcatccaggaaggaaggaaggcaggcaggcaggtgagatctgggagaaaaaggggaattttcagttctccaggtagggggaacaggagacagctggcccttcctataaggggcttatggcaaagatcaaaaacaacttaaaaggagcaaggccacccagataacataaagagtacgagatgaaatctgtccccatgaaacgggacatttgtgatccagccccagttacggcgatggggaccggaggagggagtccccatgatccaaaaatccaggctctgaacccccaaccagggtgggatccgcgggaatcagaaggaaacaggaagccgcacagaaacctgggtttattttcagatgtggaatatcccctcggcctctgcggggcgcagagggtgccttgattccggggaacagaagaggggattccacggctagcccagaatagcaccagccccaaggtccagtctggccaggccacgatgttgggggaccggcagctccatggaggaggaggaggaggaaaaaaaaaaaagagagagacaaaaataaagcgatgtgaaagtggagggcctgtccgtgaatcactcctacccgttaattttcgcctttggagaagtgtaagccaattgatttttcaaattccccacacacaaccccctccccagcgcttctcaaatatcagccagagacaagacagaaatggtacgtcgggtttttttttttcttccctttttggttgagagtcttttctttccttaaaggaaaaggggggggggcgggggggaaaccacacactccacactcttgaacctcagggttagagagacccaggtgtcacctgtttcctagacattttggggctgccactctctgcgtgagacaacagccaccctttccctcgatcacatcccctacacttcacttcctctctccgtgtcccccttcctcaattcagaatgtcacctggtgataagatgacatgcatttgagcctcaatccccttccagcatcccctctcctctgccccgcaagccacaagctggcagctttccgattccagagcaaggtaaggtgtgaaaatgacaaaattcacagtttaaaaagcccttgaaaccttcaagccccggatacgtgccttggtccgtgaatccatggtgaatttttggtttttttgttttgttttgtatcagcttgccacacgaatcctgcgaggaacagcagttatgtcttaatctcctctcctcctgtccccaccggaggctgagccactctgcctggtgagcggttggagggtggggcggcggcgggtggtgggggggagggtctctcttcaaattcccctccctgggcatcttttgccgcagggaaggacggaggaagggcaacctgcacaggctttgcccgagaagggttctcatcctccttgcaaattctaagaggacacccacccattggaaggtgagccaggagcctaccctggatgcagaggagagctggggagtgcccctttctgggacccctgtctccttccagaaagtacgagaccctcccagaagggggctacagcggtcagcactgcgcccgccaaacctaaagctcatctcaagatcttcccgtggctccgaccgactctgcaaatggagcttaatgggtagcagggggaaggaattgctctcagccgaaaaacattaagctttgtcaattatcccccaaacccgctgggtttataaatatccctttttatttttagggttttccctcccgctcgcccccatcccgaactctctccacgccccgcttcttcccccacgcacacggcggctgcaccgtcacagaaagcaggtgaacgcggggccacggggcgctcgggtagaaatgccacgtcgcaccaccaagtcacaccgtccctgcccgtccctctccggccatcccactaactattgtattggggccatgcagccgctggaataatcagcgaagccacaggtctccccatcttggcaagtggaggtgtgcgctgccctcagacatctgtgaaccgctgttcaacgccaaccccgaaggcagaaggggaaaccaagtcacctcccagaaagacgtttgatgagcagagatagatttgcctccagactggtaccaggtctggggaaacccaggcagagccccaggctctatgcgacccaaagaagaaaaaaatgggtgcacagtgatggctccaggtctccccacccagatgctaccacgaaatccctggcatccacgaagcttccccctgttccatggtggaaattgggggaaaatggacttgtgtctccaagcagggtccatggacactggacgatgcctgaaatcccctgggaggcagggaaaaaaggcgcactgaacgctcaaccggggtataaggagtgatttttttttctctgctggcagcaggcaggaacctggggtttgaatgtccccttctctgtcgccacctcacgcagacttcagaggctctcaaggtttcctggagagggggaaatcgtccccggagctgacctgccaaccagtagcaccctccagcgcctcagccgggccacgccaaaatgacctgtcacccatctcccgcggggagtggggagcgggccagtccaccgcctcttgggacggcatctctggacggccactgacagtaccagtctctgtcaccccctggggggttaggggcaatgtcatcggccagggtggcagaaatagaaaagtgcgtgagctcaccaggcagcctgggtctcctgcgacgttttgtttgcctgagcccaattagaacaactctcaggatgatggagtatggcgggcggtggcccccagggggctgggaggcctagcccccatgcagaagtgcaccgtcatgatgagggtgtcccccgggcctggggaacagggcaggaccctgcttcccggagggaaataatgaagactccgccagcctgccagccagaaagagatgccccacggaaggctttgtggagggcagcgggggggtaggggagggatgcccaggtggggactcagtcaggcccaagctggggggctgtgggatttgagggcgggaagcagccgcccccagccccagctgcctgccttccaccgccaaaatatcagctggcaaagaaagaagagcagagggacagaaggcaggcgcgattggcagggggaggggggcacaaaggaagggaccctgggagggggaggggacttatgcaaatggcagattcgaccaagtccctgggccattaataaacgctccagcagctgccgctggtatcgcaggagcagaggagcgggatggcttccttctcccgggcgaaaggcggcagaaagagggaagaagggcgccccagacaaagaggcgccgtcaccctctgcaccccaaggacagcagcgatagggggccacccagaggaggccagaatcccagcagccaaagtccgggtggtggcggacgggagcccggagcgtgtgggtccctgtccttgggaccctaggggtctcttcctgcctcctccggcttctaggtatcatccctgctgctcagccgggactccgacacctcggacacccgcttcactagccgcggctgccgggatgtgtttttagggtctcggccagaggcaggaggaccccatgctcagaagggggctcccctagattgtgacggggggggacaggggaatcccagctgagcccagaagggggaggcaaggcacccccaatgaggctctgggaggtttgttaatttgggggaatgaggtcccaggaggtggctggatttgaggaagggttgcagaggaaggggcgttcttggaagctgcatatttagggagacgagaagacgatttgagactggggaaagagggtcaaccgaagaaggaggtcccagatttggggcggggggtgtggctgaaaaaaagattcccagtttgtgggaaaggttccctgatttgaggattctggagagaaagcggccgaaggggagttccccaatttgggaagggggggaattggtgggaaatgtccaggatttgtagggggaggtccgaaggggaggatcttaattttaggagagattcccataaagagaggtgaacttggccgcaacctggccgaaccctcgcacccacggcgcgggcactctaacctggggggctcccctcagggcacgccccgcgccccctttaacccagtgccgacggccccgcccccggtatgacgtcacctcccctccccccgcagcccccgggggctcccggggcgtgcggaacccgcggggctggcggttccaggggcggcttccccactctcgggatccccacggggcccccagcgcggaggggagactggggtgctgggcgtgcgcgtctgcctgccagagcccctggggctgggggctgaggctcgcccctgggtggggaggctggaagggggcgccgaggccgcagaagggtggggcaatgcccgagtgccggaggggcgacctcccataaggcaacgacagggcccggagtgttccaggggagacggcgtagactagggggtctccaggggagggagacccggagagggaaggcggcgggcgcagcagccctggagccaccccgcctggagccacccgtcccggctcctctccgctccggggcgcccgcatgccccccatcccccggcacagcgccccctgcctccaggacccgcccggggacccgggccgggcgccgccggggccggcaccggctccgcacacacgcgcgcccccctccgcgcctctgccccgcccgcagcccggggtggtgcagccggcggcgctgggcagcttccaatgccgcgctctgggcgcttccagcccagccccctcccacgccgcggacgaagcccccccagcaccccctgccgagcgcccccagcgcggccccggccctgtccctcggggcattgtccgggcgcagctaccggggcgcagcggctgggcgtgcaactggctgcagccgagcatcctccgagcacaatggccgtgcaggcttccccggcacaaagccggcgcgctgcccactcggctgcctccgagaccccccttggagcgcctgcatttttttttcctctaatccatgattttatttttttttttggctttacctggaggctggctgggctgggctcccccggctctgccccgcttcacatcgtggctgttgcatgggatccgagcggagcccgagcgccagcggctcgcggcgtgcgcgcgccggccgggctgccgggcgggcggcgcgaggacactcactgcggctcgcgctcccctagctcccgctcgcgcgcccccccagccggtgacgtcatcccttccgccagcgccgccgccgccgccgccgggtcgggggcagggccggcccgtgcgcgtcactgcgcagccgcgcggccgccacgccccccggccaatgggacggcgcagcgcggtcacgtggctccggggtgtttaaagggccgcgggagcacgtggggcgcggggcttcgcgggacacgtgggcggctggggtggtggtggtggtggcggctgcggcggcggcgggaagggcccctggggctactgtccgtgcgggagccccagcgtcctgggtgcaaagggcatggcactttctgtgcgctgccctaaactgtgccacggctccccagtacccttggaataaaatcccgcctcctctctgcagctcgccgtttcacattagcgcccactaccctgtcccctcccccccaccatgtcaatgatccagaaaaaccagctgctccttctttgctttttcagagatggggtctgccacctgggcctcagtacagtggtatgatcatagctcactgcagcttcaaactcctgggctcaggtgatcctcccgcctcagcctcctgagtagttgggctcgggtgatcctcccgcctcagccagcttcttacagttcctctaacttgagcatccaagaacttccccttctcatctttccaatttctgctcaaataagcagcgcctgggagaagccctccctgacaacagctaccagccacgccccactccactctatcccattatcccggtttgttgttgttgttgttgtttgtttggttttgagtcggagtctcactctgtcgcccaggctggaatgcagtggcgtgatcgcggctcactgtaacctccgcctcctggattcaagctattctcctgtctcagcctccggagtagctggaattacaggcgtgctgtcaccacgcctggctaatttttgtatttttgttagagacagtgtttc[144 bp omitted]cagagatccctattgtaggttgaacacatgaatgaatggatgatggagcacttcttatagagtaagcactttacacaggtctcacctaattaccatcccctgcttccctggagtcaggacgagccacagttggaacccagctaaaacactgatttgctgtgtgaggcccggagcctcactttccccatctgtagaatggatttgcctctggatctcagctctcatctgtaaaatggggcaaggtagcccctgctcctaaggagggtgtgatgatgaattgctataatgtggcagcctggctgccattggtgcctgaagatggaataataagagaaaagaggccgggcccggtgactcatgcctgtaatcccagcactttgggaagccaaggtgggcagatcacttgtcaggagttcgagaccaggctggccgacatggcgaaaccccatctctactaaaaatacaaaaattagccgagcgtggtggcaggtgcctgtagtctcagctagttgggaggctgaggcaggagaaactcttgaacccgggaggcggaggttgcagtgaaccaatatcacaccactgcacactctagcctgggcgacagagtgagactctcaaaaataaggaaaaaaaacagagcggaagtaaataaaagggggatattgacaaaggtaagggggttggagggctcacagccaccaagcaagattgcacatcagtccttgtgttttgatcatgtcgaaagcatttatttcctcaaggcacatatttggagaaggcctggtgcccaacagaggaactcaactttagaattggttttttttttcctccaaaattgttgattcattcattccaggccacagatgcagataaacaaaaagcattaacccggggaacaaaacgataaggcggaagtcataaacaggagaaaagagaggagataatgaataatttaacaaggaacctaatttaagcttggagtttcccagcggccagtgcagcagccacgtttgcagagcctactttgtttttcttcctggtggggtgaccctgatctgaccgtttacaatctggcctcagttttctcatccaagcaatgggaacacgatcccatcttgaaggatcaaatggggtggtctgtgcacaaatgcttagcgtggtttctcacgcacagtgggtgctgaagccttggagaattggtggagacacagtaaaatgagatggctgatcgtggaggggctgatcatggcacgaaccccagcccagtgacctgtttgggaggtgacctcaaacaagtggccgcaacactgtaagcctagctgtccccatctagaaaagggggacaaccactagtacctctgagggattttgtgagcagtcaaagaaaacagattaaatacatcaaaaacagaattaaaatacattgtagcagctgggcgcggtggctcatgccagtaatcccagcactttgagaggccagggcgggtggatcacctgaggtcaggagttcgagaccagcctggccaacatggcaaaaccctgtctctgctaaaaatacaaaaattagccaggtgtgatggtgcatgcctgtagtcccagctactcatgaggctgaggcaggagaattgcttgaacctgggaggcagaggttgcagtgagctgagatcacaccactgc[144 bp omitted]taacatggtgaaaccccatctctactaaaaatacagaaattagctgggcgtggtggcgcgtgcctgtagtcccagttactcagaaggcaggagaatcgcttctacccgggaggcagatgttgtaagtgagctgagcgccactgcactccagcctggcaacagagtgagactttgtctcaaaaaaaaaaaaaaatacattccagcatgtgcttgggaaacccatctgttcaggccatgcatccggccccgctcccaggttgtttgaagtgctgtggacaacagaagtaaacaaaacagtctttaaaatccctggagttggccaggcactttggcccagcactttaggaggctgaggcgggaggatggcttgagcccaggtatttgggactagcctgggcaacatagggagaccccgtctttacaaaaagttttagaagttagctgggcatggtggtacacatctgtgatcccagctacctgggaggttgaggtaggaggatcgcttggatgtgagagtttgaggctgcagtgaactctaagcacgccactgcactccagcctgggcaacagagcaaaaattcctggagtcaacagtgctgggaggagataggaaatatcttatttagagtaaaagcttaagctcttcccacagctcaccaagctctgcataacctacccccttccccgccctctgtcaccctcgctcactctgctcccgccactcgggcctccttgctgtgcctccaacacaccaggtaaggtcctgccacagagcctttgcactgtctgttccctctgaccaggatgctgttcctcctgcttttctcaaggccaattgttcctccttgctcttcgagtctctgggagaccctcccagaccatctcactgaggtgaccacatgatcatctttacttcagtatcagattatttatcatgatttggaatgattttatattttggccggtttgtgtgtttcctgcgtgtctccctactctagctgtgcctcagtttgcctgtctgtaaa[131 bp omitted]cccatctctactaaaaatacaaaaaattagcgggcgaggtggcaggtgcctgtagtcccagctactcgggaggctgaggcaggagaatggcgtgaacccgggaggtggagcttgcagtgaactgagatcacaccactgcactcctgcctgggcgacagagcaagagtccgtctcaaaaaaataaaaaataaaaaataaataatattggtcccttagggctgtctggagggtgaaatgaatcacactatgtcaaccacctgccaccaggtgcagactcacaaaaggatttctggtaagtgtggtcactgtaggctgggcgcggtggcccacgtctgtcatcctagcactttgggaggccgaggtgggcagatcacctgaggccaggacttcgagaccagcctggccaacatggcgaaaccctgtgtctactaaaaatacaaaaaaattagccaggcgtggtggcgggtgcctataatcccagctacttgggaggctggggcagaagaatcgcttgaaactggtgggcagaggttgcagtaagccgagatcgcgccattgcactccagcctgggcaataagaaacaaagtccgtctaaagaaaaaaaaaaaaatgcggtcactgtaaatgagaaaactatggttgcctagccagaaacaaaagatgatcctacaagtcgatacaacaagaacagaaaattataaaattcttttttttttttttccaagacagggcctcactctgttacccaggctggagtgcaatggcacaatcacagctcactgcagtctcaacctcttggggctcaagtgatcctcccagctcagctacccaggtagctgggacgaaaggcacagaccactacacctggctaatttttaaattttttgtagagacaggctctccctgtgttacccagcctggtctcgaactcctgggcttaaatgaccctcccacctccccctcccaaagtgctgggattataggtgtgagccactgtgtgcagccaagccaagaacagaacattctagtctgatgctgttgcagcctctggacagctccaggaaattgacacgtgttacaaaggtgttaaagacgcaatagcaccaagctaagccttcctgcaggccaaggcttgaagagaacaaaggagagaatgttgtccccaggggcatgcctcaaccctccaagttccacactgtgaaaaacactcagactgggaggtaggacatggtgggttctgggtctctttcctgtctgctgatcgtggtgagctggcacgcacactgagggtgtgagtcattgttgggtgaaaagttcagtcaatgaacattcgctgcttcttcaggagcgttgtgggggagggggctcttcccactctcccaccctcctcttccttttctgccagaccaacctctgcctaggagcctcccagaacctggtaattagctccattgtggttttgttgagataactccaggggaaccatcagccgcccatcactgtgtacaaacaggacccttcataccaagttcaggattgtctgcaaagaactcagccttaaattcctgccagacaggtccaaaacatctcccctaaactttccctgtgccagagattccactatcgttgcacgttacttcaaattaaatgttgttctctctgctcctctctctgtctctttctcctcacaaattcgcttcaaacgccaaagggaagaggagcagataggaacatcctatttgctgcacacctgctctgtgctgggctccatgtggggttcacttgggggtcccctgatttagctgatttggtaagcgttggaggatttggggaggcatgggttaggaaaacactcaacaactaggcacagaatgaagctttctcaacctagtaaaaggcatctacagtcagtatcatactttatggtgaaagactggatgttttccccgtaagattaggaacaagatgagaatgctccctcccaccacttctattcaacattgtactgaagcctataaccaggcaactaggtgagaaaataacataaaaggcattcatattggaaaggaagaaattaaactatctctatttgcacatgacatcattttgcatgtagaaaatcctaagggatccactaaagacctataaaactagtaaatgaattcatcaaggcggcaagatatgaaatcaatacacaaaaatccattgtatttcctatgcagtggcaatgaacaaacgaaatgaaattaagaaaccaattccatttacaattgatgaaaaagaataaaatacttaggaatatatttccaaaagaagtgcaaagcttatactataaaaaataacaaaaggttgaaagattaaattaaagaagacttaactaaatggaaagacatcccatgctcatggattggaagaataatattgttaagatgtctatactccccaaattgatctaaagattaaacccaatccctatcaaaatttcagttagcttctttgcagaaattggcaagctgatcctaaaattcatgtgaaaatgttcgaggaacttagaacagccaaaacaatcttgaaaaagaacaaagttggaggactcagacttcccaatttcaaaacttattacaacctactgtaaccaggacaatgatgtactggcataagaatagacattcagatcaatggggtagaattgaaagtgcagaaaaaaccctcatatctatggtcaattgatttccatcaagttgtcaattcagtggggaaagaatagtcttttcaacaagtggggccaggacaattccatattcacatgctaaagaatgaagttgaatccccacctcacaccatatacaaaaatcaactcaacatggatgatagacctaaatggaagagcttaaactataaaactcttaggaaaaaatgcagaggaataaatcttaatgatcttgaattaggcaatggattcttttgaggttcctttccaggtgattaaaatattctaaaattaaaatgttaaaaatgttctaaaataaaataaaaatgtttaaaaatgttctaaaatgtggatgattggtgatgatgatgtcccttatacaaaggggaaatttggacacagagacagacccatatagaggggagatgatgtgaagaagagacacagggagaaggcggccgtctgcaagccaaggagcgagacctcggaagtaacacatcctggctgggtgtggtggctcatgcctgtaatcccagccctttgggagaccgaggcgggtggatcacctgaggtaaggagtttgaaaccagcttggccaacatggagaaaccccatctctactaaaaaaaaatacaaaaaattagccaggtgtgggtagtggcaggcacctgtaatcccagctactcaggaggctgaggcaggagaatcgcttgatcctgggaggcggaggtcgcagtgagcggagatcatgttattgcactccagcctgggcagcaacagtgaaactccatctccaaaaaaaaattgtttttgccatgttggccaggctggtcttgaacttctgacctcaggtgatccacccacctgggcctctcaaagtgctgggattataggcatgagccaccacgcctgcccaggattggttacttctgagacctcactccttggcttgcagatgggccgccttctccttgtatctcttcttcacatcatttcccctatatgtgggtctgtctctgtgtccagatttcccctttttataaggacacccatcataaggtggatcatagggtggatcgggacccaccctaatgccctcattttaactttacttctgtgaagaccctatttccaaataaggtcacattctgaggtcctaggggttaggacttcaacatctcttttgggggaacgcagttcaaccccataaaagaccctttccctgacagtggcttcactgatacccctcaaggactttacctactcctggacaaggagcttgacatccccatgacatatgacaagagatgctagaccctagcccataaatcatgagcaccctttgttgattgcaataagatccaggttttgggagaggcaaggggatgccatgcagccagcctcccagctctagggcctggctggcacatgtaaagatcaagggctttattctcccactctccctgggggacgcaatgacaaattcagatcaggcctccgttgtctcctgccagctggcggtgcagacagggcctcttggttcatcccttctcaaggagaaaggcttggattctccaccaggtggggtctgtgctgggtattgtgtgtagagtcagagggacatgcctggcagtgtcatctggacccctgccacaagcctcaccaagccaagggccttccagtgccatcagtgtgggccctgagtgtggtacttgaaactttgagaggctacaacttatttattattgttttttaagacagtctcactctgtcactcaggctggagtgtagttgcatgatcatagctcactgcagcctcaaactcctatactcaaacaatcctcccacctcagtctccaagtagctgggattacaggtgtgcaccagcccacccgtctcatttctgcttttttttttttttttttttttgagatggagtctcgttctgtcaacaggctggagtgcagtggcacgatctcggctcactgcaacctctgcctcccgagttcaagtgattctcctgccttggcctcccaagtagctgggactacaggtgcatgccaccacgcccagctaatttttgtatttttagtagagacgaggtttcaccctgttggccagaacggtgtcaatctcttgacctaatgatccgctcacttcgggctcccaaaatgcatttttgtatttttttgtagcaatgggggtttcaccatgttgcccagattggtctggaactcctgggctcaagcgatcctgacacctcagcctcctgagtcgctgggactatagacatgtgccactatgcccagataatttaaaaaaaaattttttttttttgtaaacatggggtctcattgtgttgcccaggctggtcttgaactcctggtctcaagtggtcctccctcctcagcctcctggagccctgggattatggatgtgagccaccacactggcctcacaaagtgattttaagttctacgcactgagcatgaaacactatggtatggtcgcctgccaaaattactcacgtctaagaacagatgattccccttgagcttgttaatgtccctaggatttgttaatatcatggttgggtctttattgtttttctttgtaacttttttgtcttccttattcatttgacttgttacattgttacttgcgctcgtgttttaattccactgatacttgcatccagcgctggacacatgacctgaagtttctttaaactgggcgcggtggctcacgcctgtaatcccagcaatttgggaggccaaggtgggtggattgcctgaactcaggagttcaagaccagcctggctaacatggtgaaatcccatctctactaaaaatacaaaaattagccgggtgtggtggcacatgcctgtaatcccagctaattgggaggctgaggcaggagaatcacatgaacctgggaggtggaggttgcagtgagctgagatcatgccactgcactccagccttcgacacttcgacagaggagactccatcttaaaaaaaaaaaaaagagagagagagagagaaaagaagaagaaaaagagacatttaggccaggtgtggtggctcatacctataatcccagcactttgggaggccgaggcaggcagatcacctgaggtcaggagtttgagaccagcctggccaacacagtgaaacctcatctctactaaaaatacaaaaattagccgggcgtggcaatgcccacctttaatcccagctactccggaagctgaggcaggagaatcgcttgagcccaggaggcggagattgcagtgagctgagattgcaccactgcactccagcctgggcgaaagagtgagaccctgtctcaataaataaataaaaaataaaatgagacatttagttactgtgttagtccattctcacattgctataaggaaataccgaaggctgggtaatttataaataaaagagctttaattgactcacagttccacacggctgggaaggcctcaggaaacttacaatcacggtggaaggcacctcttcatagggtggcagaagagagactgagagagggagaaacttgccaaacatttataaaaccatcagatctcgtgagaactcactcactatcaggagaacagcgtggggaaaccatccccgtgatccaatcacttcccaccaggtgcctcccagacaaattgggattgtggggattacaattcaagatgaggtcaggtaatggctcacacctgtcatcccagcactttgggaggctaaggcagatggatcacctgaggtcaggagttcaagaccagcctggccaatatggtgaaaccctgtctctaccaaaacaaacaaacaaaaattagctgggcatgctggcgtgcacctgtggtcccagctactggagaggctgaggtgggagaattgcttgaatccaggaggtagaggttgcagtgagccgtgatcatgccactgaactccagcctgagcgatgaagtgagaccctgtatcaacacacacacacacacacacacacacatacacacacatatacacaattcaagatgagatttgagtggggatatggccaaaccatattagttacctaaaagcaaacaagtggatgtaaataaaatattaagtaactgatggtatgcacagcacaggaggaagttttttgaggaggactaaagtgaggacaggttgaatcacctccttgaaatgtgctgacacccaggcagcatgggctttcatagacccattttacagtggaagaaactgaggcttggggtggtggagtcactggcccagggacatgtttggaacacaggtcagccctactacagaagctgtgctctttccttccctggcggtcctgcctctggatgttttctcgaactgttccaaccagctggcttttcctctgcccatctctgccactttttgcccctgccacctccaggaagccctcctgactcttccagcccattgcccctgggtctttcatcactatgacagctgggctggggtctggcacaggaaggggcttatctacctgtcccacagaagagagcacaccatggagctggccggatacctgttgagtttgtgagaccttgcattggtgtgaaaagggttaactcacttcatttgcatactgtgcccagattcgtcttgggaatacactgcagcataattgaagagaggaaggggagttgcagataccctggaggggtggatgaaggggaaagggcttattctgagcaaaacgagaggatcctgagctgggggaggggaaaggatgtagggcacagatcaccctaactgttgtggggccactgagaatgatattcttcttcccagggcacaccaacttcttttttcctgcatgttttccatatttttccctcagactataataaggttaatcttggtttacatagttcggacacatagcacatccttctgaaagttgagcaaacagcaatcttaatgggcaattcaacccactccgtgttaaccactatgcagaccagcgtgtaagtcaatcaataaatatccatgagcggcttctagttgagtttaatcacatgcagttcttagagtagcacacggcacatagcaggcacttaatagatgtcaccatttttttggtttgtttttaagacggagtctcgctatttcacccaggctggagtgcagtggcgcgatcttggctccctgcaacctccgcctcccgggttcaagcgactgtcctgcctcagcctcccaagtagttgggactacagggccgcaccaccatgcctggctaatttttgtatttttagtagagatgaggttttgccatgttggccaggctggtctcgaagtcctgacctcaggtgatctgccggccttggcctcctaaagtgttgggattacaagcgtgagccaccgtgcccggccgatattgttatttcacaccttcagaggagacagcaggcgtggatgtgaacttaaccctcccgctgccacccttgctggctcccacccaccctggcccacagggaatggcttggaccaggaggctgagaccatgagacggcgagtgggatcgtcctggcagcggagatgttgctcaggataaaacgggaagggctaaataaatctgcttgagatgtgtcccaattacccgctcaaactcctctgcctgtgcctggcactctggggccctggagaggggagtttttctgatgccctagaggctcggggctgctgcagcatttcagatgcagcacaccagtcccccagcctgtggtccctgtccttgtcccccaatattgtcataactttttttggggagcggaggaacagaaagaaacccaaatattgggatgtttctgagctgggaaggccccgacatagaacaacagaaccttccattggatgaccacttgttatgtgctgtgggccaagaccttcccaggcagctgggcagcaaaaatccacgctatgagatcagactgattatttttgttccctttttgcagctgagcaaactgaggctcagagaggaaagggtggtactgaccctccaatagcttgggagaggcagggctgggcttccggccttaggtctgactccggctcattccttaattcatgaatgcagccaacggatatttattgagcaactcccaagtgccaggtactgttctaggcaccaggaaaaagcagggaacaaaacaggccaatatctccagccctcacgtgctgacttttttaatgggggagatgaaccagatttaaaaaaaaaaaaatgtaccacgggtcagatgggacataccagggaggaacatggaacaggaaacaggaagggttgggggtgtcattatacataggtggtcacagaaggcctcactgtgatgggttttttgtttattattattattatttcgagacagcatctcactctgtcacccaggctggagtgcagtggcacaatctcagctcactacaaccttcacctcccgggttcaagcaattctcctgcct[134 bp omitted]tgcctcccaaagtgctgggattacaggcatgagccactgcacccggcccatcactgtgatgtttgaacagaggccaggatgaagtgggagaagagctttccaggcagatggcacagcccatgcaaaggccctggggcaggaccgtgcctggcgtgttggaggatcagcaaggaggcccatgtagctggagcagagtgaggagtgggaaagagggagtagaaaaggcaggaacagggcagggtgtgcagggccttcttggccacaggaagacttgggcttttcccctgagggaggcgggagccatggagggtcataggcagaggaggggcaggacctgattcagatgctcacaggtgccctctggctgctgttgcggggaggacagactgtgaggaggcagggtgggactcaagggaccagggtggagatgactacactggcccaggtgggcaatgctggggctggatccagggagaggctgagggagtgggagaagtagccagtctggggacagacagagacagagtgaccctcagccaagcttctgacccgcttgcaggctttctggggcctggacaacctgcaggcaccaatgagggccacatgctcatcattaacccagatgatgggggttcagggggctgctgcctgatcaggatttgacccacgggtgtgcaccaatcagagttagtacacagaactcccaagtctcctggcctctccagctgctacccccaggccctgtgcagcaaggtcgaggaggacacacccccacccccagaccgggccgcctgtgcccccagtgactctgtgtattggctcctgttctacccttttgcatagctgtgcattcccctgagcactttagcaggagcccccagagggcggagcaggaggcaccggtgacatcattctcagggccagccactcccagtgtgcaccagacctgatcaagatccaaagacgaccagagttcccagatgacactggggctgcaggcggtgcctgaaatagcatttcacaagtgcagcctctgttccaggcactgttcctggggctttgcaatgacccctgccctcgcagtcctaggtctgtgctgttactgccatattttatgggcgagacgcagaaagcctgagcaccagcccatgcctgcacaacacagccaggactggaaactgtctctgggcaaaggctgtccctaggtctctggtgggagcccgctctgccctcaaatcaagggaaaggtgaggggcctgagaggtcagtaatcagtggatttctcagagcagagatcccttcccaatacgaactagacttgcatacttccagggatgggaccctcactccctgtacaggagaggtgccttggttttggacaatgctgagagttagacaatgtttcctttcagccacttgggctccctctccttcttttaatctccctcctttgactctgctcctcctcttcggaaactgcgcagaaaaaaaatcgccctctcccctcctttcctctcttctccatccttcctctttctttcctctccctccacatctttctctacttcctcccccccatctccctttctccttcctgtccctttttcctctctcttctcctctccattctcccaccccttcctcccctcctctcctctcctcttcctccatgaaatattttcagctgttcctctgagtatcagaacttgatagaaaagatgattccccgaatttggagtcagacacttcactgcctcaaaactgtgtcgccctgggcaagtcatatcatctctttgagcctccatttcctcatctgttaaaaaaaaaaaaaaaagtgatattccctgttttggtttcccctgtagcctcagtgactagctcagggcctgggacacagtagttgctcaataagtgtttgccaaatgaatgaatgttggcaccctttctttttcctttcacttctgggcccattgattattccttgtgtgccccaaatccaaccctgctcaagagagggcttggctggaccttgtgaccagtgtggaactgaaaaattagacaaagtctgcctcctggctttcttcctcgttgaacaatttgcatttaaatcatgaactgtaatagttagttatgtcattagctgcttaacatgtcttcccacgcattctgtgtgccaagagggcagggcggggagttttattcacattgttcatgcttgtagttccagcacctcggacagcacctgtcacacattaggtgctcaataaatgcctgtgtggtggctgaggggtggggtgggaggatgaacatagcatgctataaccttttctgcttcctttttccttatgctccaatctatgaagttttctgaatcaaacacactcctcttagtgaggttccaggcagagaacgtggcatgatcacctccctttttttgcgctccatactcctgttaatgcaatcagcacttttctccctttttctgcttttcttcttcaggagaggaaaatgttaaaaatgtgatgatgcagtcggaagtgttttaagccttcagacaattcagacttgagaatcaagtgatggaggaagagctaaaaaaaaaatacattctcgtttattaggaggagaaagaaagtgccatctcaaaaagatcgaggctcgttaatgctggaatataaagatagacacttcctgtcctcgacaggcaaacttcacccacagctgtgggcgccaggccctcaagagtggctggggcaggacggctacaaagagaatttgattgctccggagttgaagcccaacgtgttcgaggagtcatgccaagattcagtgaaggtcacacaggatgcgagctgctgtggggaggggttgtccttgggactctcctaggacacgggaaggctccacctccatgagaagaggattcatcttcctagtctgttacatgcaaaggtctcgtctgagccaagtcttgcacagatgtcccttttcccggggaaggaagtttctagcaaacacccaggtactgactgcatgaccttgggcacatgtcaccctctcgctgggcctcagtttccccatctgccaaatgtagagaatattttaatacttaacacgctaatagtagctatgatgggttgctgttattattagctgttcttactcttcttattgttgcttccataatacccctgccagggtgtttgtccagccagcgaggattttcttgaccctctgtccctttgacacatcactagctacctcactcactgtgtgaccccaccctctggtctcaacagattggacctgggtggctatcaccacccaggttatacaaacaggctgagccaatatgattctttctttcttttccttccttttttttttttctttctttctttctttccttctttcttcttctttctttctctctcttctctttctctccttccttcctttcttccttcctccctccctcccttccttccttctgtctttgttttttgctttttgttgttgttgttgtttgtttgtttttgagacggaatttcgctcttctcatccaggctggagtgcaatggcacaatctcggctcattgcaatctctgcctcctgggttcaagcgattctcctgcctcagcctccccagtagctgggatttcaggcatctgccaccacgccaggtaaattttttgtatttttagtagagatggggtttcaccatgttggccaggctggtctgaactcctgacctcgggtgatgcacctgcctcagcctcccaaagtgctgggattacaggcatgagcaaccacacccggccccagaggaattttttaacagggaagggattccatgtctggctttaaaaggtcgatctagcacatgaaggagcaacgtttcctgaaaagtgaaaagtcagcctatatttatccaatgaccccgatggcacaaccagctcattgatgagaaatatttaatagctgtttggggctgcgttgagaaggattctgagcctgtggctcagttctgcagggaaaggagtgctgcaatttattagtgatgcctgggccttgactccctgggaaagagttctgttattgattagtgatgcctgccatggaccattgcatggaccctggtgttctgtttgttatacatttgccttccccgggttaagtagctgctgcttctcagagaaaatcctccacaccctcctacagaggacagtaggatggctccagactcagacagtcaggggttccagtcttggctggactgctttctcgctgtgtgactttagacatgtggcttctcatctctgtgcttcatgttttctcctctgcaaagcgggaacagaaatctcacccacacagagttcttttgcaaatagttttaagtatccggcatgccgtagggttctgctgaggttgatattggcctctccagggccccctcactgcagcccaaggtctgaaggtaaatcagttttatttccagctccagctccaaggtgggttccaactctgcccttgagacctggcagacaccctcagctgcatcttgcacctggggtttgttcccagtgctgccacagacatgctcccacttggtggtggcgtgcatgaaacaagatggacgcagggaccgtttggcttggaactctcctggggaggaggtccccacacctggcgtccactcacctcccggcaagggtgattcttgccagcctgagtggggactgttccgtgcctggctgcttccagcacttggcctgatgtcccgccatcaacatttatgtctgcaggtggctgggaccactctgccttctctgtgaattggcatggactggagggactttggggagctgagggagaagtggacggctcagcagcatcttgctggtgcctgaccgagagatgactttggagacttttct[223 bp omitted]gaggcaggagaattacttgaacccaggaggtggaggttgcagtgagtcaagatcgcgccactgcactccagcctcggcggcagagcaagactgtctcagaaaaaaaaaaaaaagtacagagtgaggcagggttcactcagcctcaggaccaggggggagatgtactcctcccagacaccccggccccttcctggccccctgactttactcccacaccccactcggactttgtaccctccactcagcagccagaagaagatttaaaaacacgaacgtggctggacgcggtggctcacgcctgtaatcccagcactctgggaggccg[135 bp omitted]ggagcaggagaatcgcttgaacccaggaggtggaggttgcggtaagccgagattgcgcgactgcaacccagcctgggtgacagagtgagattctgtctcaaaaacaaacaaacaaacaaacaacaacaacaacaacaaaactggaatcaggtcaggccaccccttctccagacccttccacgggcctcctccagtgctctccccataaagttcatattcctccccagaccccctgcccatctctgagcctcagtttgttcacctgtcaaatgggtctatgagccatcagactgtgagcccacaattggccatcttgttccttgctgtatccccagcacctagaacagcaccagacacacagcaggtgcctaataaatgaatggaggaataagcaagcaaaccaatcagcaaattcattcacacttacaggctcagctctgtccttctgtggcctcagtgactcctgcctggtccacctctggctgcctctctgagctccgtctttctgggattgatgagttgggtctaagcagaggcccagggtacagatgtcactgtggcctctgtgtcccccacctgtgtccccgcagctcccgggctgcagcctgtgagggaagacagatgggctcataatgtccaatgaatcatagccactgcatcccagcctggacacatgcccagcccactcatccgcgggtctgtgacatgtaagagttggcgctactcttcccctgtgtgtgccagaccctgtgtggccacctgggttggtgtcatccaggggaaataacaggctttgttctccccgccccatctgaccggttttctcctctctgccacaaaagtcaacattctggacaagggtgggaggaagtagtgcttccacatttcgcaggaggactaacattaattaagcacttaatatgtaatgggcaccatttggagccctttattacaatttccacatttaatcctccaacaatcctattaccagccccattttacagatggggaaactgaggcacaagtgacttgcccaaggcgcagagccaccaagagtgcttatggcagtattgtctccaatagcaaaaatggaagcaacctagatgtccacccatggggaatgattaaaatactctgtttttttgttttgttttgttttgttttgttttttgagatggagtctagctctgtcccccaggctggagcgcagtggtgcgatctcggctcactgcaagctccacctcccgggttctcgccattctcctgcctcagcctcccaagtagctggaactacaggcccccaccaccacgcccggctaatttttgtgtttttgtagagacggggtttcaccg[137 bp omitted]gcacacacctgtagtcctggtgactcgagaggctgaggcatgaggatcacttgagcccaggagttggagggtacagtgagctatggtcacaccactgcactccagcctgggcaacagagccagatcctgtctctaaacaagaaaacaacaacaacaaaaaaattagaccaggtgtggtggctcacacctgttatcctaccactttgggaagctgaggtgggggggttgtttgaggccaggaatttgagaccagcctgggcaacatagcaagaccccatctttaaaacaaattaaaagaaaattagccaagcactgtggcacacacctgtggtcccagctactcgggaggctgaggcggggggatcacttgagcctggcgagtggaggttgtagtgagcagagagtgacaaagaaagaccctgtctcaaagcaaaaagacagagagaggaagaaaaaatttaaaacccagtctggttccatagaataccaaaaagaattgcaaacaagtgttcaaacaaaaactagtacacacatattcataacagcttgattcgcaattttcagaagctggaaacaacctaacagtccgtcaacggatggatgaataagcaaaagcggtccatgcatgccgtggaatatattcagccataaaaaggaatgaagttctggccgggtgtggtggctcacgcctataatcccagcactttgggaggccgaggcaggcagatgacttgaggtcaggagtttgagaccagcctggccaacatggcgaaaccctgtctctactaaaaatactaaaattagccaggcacggtggtgcatgcctgtaatcccagctacttgggaggctgaggcaggagaatcgcttgaacccgggaggcagagg[133 bp omitted]gctcagtgagaggagccagacacaaaagaacagagactatatgattccagttattgaaaatgtctagaataggcaaattaatcaagacagacagcagtgtagaggctcaggagaggaaagcgggaaggtattgcttcatgggtacagagtttggattgataaaaatgttttggaagtagatggtggtgatattgaacaatattgtgaatgcactttaatgccattgaacatttttatttttattttattttattttattttattttattttatttatttatttattactttttgggatagagtctcactctgctgcccaggctggagggcagtggcgtgatctcagctcactgcaacctctgtctcccggattcaagcgattctcctgcttcagcctcctgagtagctgggattacaggtgctcaccaccacgcctggctaatttttttgtatttttggtggaggcggggcttcaccatgttggccaccatacccggccccactgaatatttttaaatgaataaagtaataaagtttctattatgtgtgtaatttaccaccataaaaaattaatagtctgggccagacgcggtggctcaagcctgtaatcccagcactttgggaagccgaggcgggcggatcacctgaggtcaggagttcgagagcagcccagccaacatggtgaaatcctgtctctactaataatacaaaagttagccagacatggtggtgggcgcctgtaatcccagctactcgggaggctgaggcaggagaatcacttgaatccgggaggcagaggttgcagtgagcagagatcgcacaattggactccagcctgggcaacaagagctaaactgtctcaaaaaataagaaataaataaataatagtctgctttattccctcagtggaatactatgcagctgtataagaattgggagtcattttgttgtgttttgagagaggatctcactctgtcgcccaggctggaatgcagtggcacaatcgtggctccctgcagccttgacttcctgggctcaagcgctcctctcacctccacctcctgagtagctgggactacaggtgcaccaccatgcctggctaattttttatttttatttttagtagagatgggggggtctcgctatgttgtccagagtggcctcgaacccctggcctcaagtgatcctccagcctcggcctcccaacgttctgggatgacaggtgtgagccagtgtgctcagcagaagtgagaatcttcgtgtactgaaaagaaatgatctcgaaggtgtcttgttaagtcaggaaggtgcagaacagcttgtgggtacacatgcgtgtgtgtgaaaaaagcaagtaggcaagaaaaatatacacacaagtgcttgtgtgtacataccctgtccctggaagggagacaggggacatgggataacaacggctacctctggggatggttactgggtgatcagggccaggacagggaggggaattttgccccccataccttgaaaggcaaaaaaaaatgatagtaaaatccagctctgggccagtcgtggtggcccacgcctgtaatcccagtactttgggaggccaaggtgggaggatcccctgaggtcaggagttcactaccagcctggccaacatgataaaaccctatctcgaccaaaaatataaacaaattagctgggtgtggtggcgcatgcctgtgatcccagctacttgggaggctgaggcaggagaatcgcttgaacctgggaggcagaggttgcagtgagccgagatcgcaccaatgcactccagcctgggtgacagagtgagactctgtctcaaaataaataaataaataaataaaattaaaaagccagctctgccttgaacaagctgtgtgacctcaggcaggtcacttcacctctctgtgccttagtgtccttatctacaaagcaagcatgatgaataccagctcagaaggatgaggatgaggctgtactgcattaatactaatagggtgctggaagtagggtttggcataacacaggtgccatctaagcatttctcttgagttgggtactcttttctgcctttatctatccaaacaaagaaatgtctaaaactcaagtttttgaatgcggaacgaagggtgtatggagagtgtttagctcctggtgcccagcccatgtttggcatctgcagcctctgggctggtgagctcaccccttctcttctccactccttccccggaccatccccagtaacccagcctcagagcaagtgatgcaacctggggaaaccgagtccctctggccacgggtgctcccaccacaccttgcctgcatggaagatggagggcctcctagcattttgttctcaggggatgtggaacgaggatgggaagtgcctcccagtcaccttaattagcatctcagaggagctggttgccatgacatcgggaggaagttgctggccggggcggagcctggcccaggttgccccaggagggaccccatttctctccacccaccagtggctggcctggccaagtccctcagctctggactcaggctaagttgggtttccatccaagctttacttctcaccatctgagacttttcctcttctgggaagtagaaactaattttaaaaagtcttcctaggaatattgggagaatttaatgggatataaaatgcccagtgctgggttcggagacttaactattgttattatttcctttggagaaagtggttttaaatatgacccccaaacttttcttctttctctttctctctctttctttctttcttttttttttttttgagacggagtctcgctctttcgcccaggccggagtgcagtggcgctatctcggctcactgcaagctccgcctcccgggttcactccattctcctgcctcagcctcccaagtagctggaactacaggcgcccgccac[187 bp omitted]ttctctttctttctttctttctctctctttctttcttttctttctttctcgctctctctttcttctttctttatttcttcttttttttcttgctccatcatgcaagctggtgtgcagtggtgcgatctctgctcactgcaacctccgcctcctgggttcaagtgattctcctgcctcagcctcctgagtaactgggattacaggagggcactaccacgcccggctaattttttttgtattttttttagtagagtcggggtttca[131 bp omitted]tcccaagaacacacttcacaacgttagtagtggttacgtctaggggctggcgatattaataataactgacacatttcatccccccaatgactctgagatgggagtggttgtgcccattgtatagatagggaaactgaggctcagagaggggatgcagcctgtcgacagtaactgggatttgaagccaggtggccaactccctgacactccagaccaccacaggactgtgaattactcctttcttttcttttctttttcttttttgttaatagagatggggtttcactatactgcccaggctggggtgtagtggtgcaatcatagctcactgcagacgcaaactcctgggttcaagcgatcttctctcctcagcctcctgagtagctgagactataggtgcacagaaccatgcctggagaatttttaaagtttttgtagatatgaggtctcactacattgctcaggctggtctcaaactcctggctgcaagggatcctctcgcctcggcatctcaacaaactgatattacaggcatgagccactatgactggtctgaatgactcatttctaagttcattggttggtgggggggtgggtctggtccacaaacacttcccaacctgaggataaggaggccaccctctaagcagtatctgggggccagcctatgaagcaagcacgtctatataacctcccctctccacccctcctctcaagggaggaagctgggggtgctgaggcccagagagaggctctgccttaggttatgcagcaaacctctgcagtggtctctacctctccatctatctatctctgtccaggtctccagggagggtatgagaagtagaaataagatgtagtgatttaaaaaaaataaaagcaagattgatgctgctgctaaaggatcttctgattcaggagacatcagagagcagcattttgggtgcaagtggaggttgggtcctccaaccttgctccagggccagataagccccccccggagggacttttttcagctggtgtgaatgttgtgggccctgagacttggaccccataagagtccctcagagaaaggctgtgtgggcaggagctctgccccattcaagtacaaccacagcctgggagagcaagggacagcctgacaggctctggtccgttcaaccaactcaagttagtgatgatgctggcgaggccatgtgttggcagtagggggaaggaggctcaggaagaaaccaaggaggcaaactgggtagtaccttgaggatctcaagggaatggccagaggggcaggtggatgtggcagcacaaacctggagatagaacagagcatagggtgtagaatgtgtagacactgaagggatgggggggagaatggatgtgttagaattattggatgggtggatggatggagacataaatggttgggtggatgggttacagatgggtgatgagtgctgcctcctggcttcagctgctatgggtggatgatagatgatagacgggagaacggatgatggatggatggatgaatgattgatcaatgaatgggtaagtaggtagatacatggatcagccagtgggtggatgggttatagatggatgatagatcatgggtgagcaatggatggatgaatgagtaagtggatgagtgactggtggatggattatggatggataatagatcatggatgggtgatggatggatgacggatggatggataggtaggtggatgagtggttgggtgggtgggttatggatggatgatagatgatagatggatgaatggatggatgaatgagggatagatggttggatagatgggtaggtgggtgaatggttggatggatgggttatggaaggatgattggcgatgtatggatgaatgagtagataaatgaatgaatggatggatgggttacggatgagtatagatcatggatgagtgatagatgaatatatggatgaatggatggattgattcgtggttgggtggatgggttatggttggatgatagatggtggatagacggatggatgaatgaatgatggatcaatgaatgggtaggtaggtatacagatggatgaaagcatgggtgaatggatgaatggattgttggatagataaatgggtagcactactaactgtaatggcaacagcccagtgataccagttctgccttaccaagaagaatatgtactgagcacatgacttcactaaatcctcagactgactgagtgtggggttggctgtggccctgatgctttcactctacactcggggtatccga[186 bp omitted]ggtggcgggcgcctgtagtcccagctacctgggaggctgaggcaggagaatggcgtgaacctgggaggcagagcttgcagtgagccgagatcgtgccactgcactccagcctggacaacagagctagactccgtctcaaaaaaaaaaaaaaatctcagtggtgggctcttcccagtactattctaagatttcccttgtccaggtggcttcccagtgtccaaatccagtgatcacttctcagcacccatcctcctcatgctcctagcaacatctaccctgggtggtccctcctcctgggagcatcatcttcacgtggcccccagcgtccccacatttgcctgcattcaccctcctctctgttggactcttctcagtctctctgcaagcttctctctgcaagcttctctcttctgctcagctgctaaacacagggtagtccttgagcatagtctctgtctcctcttctcattcatccccatggacatgaatacattctaacaccatggactaacaccatggacacgaatacattctaacaccatggctagtaaaagctagctctgggccaggcgcggtggcccacgcctgtaatcccagtaccacggactgtcagatttatgccttcagaaggcatctcttctgggaacatcagaatcttatatccaaatggcccgtctgcatctacatgtaggtgcccaaaaggcagctcaaacttaacaggccaaagccaaaccttggtcatcacccctccccatcctgtggctcctaccccatcctctatcatccatccataatatatctacccaaccattcattcacccactcattcaaccatccattcatccactcatccatccctccatacacccatccatccctccatacacccatccatcatccatctattcatccacccatccccatccatccatttatccatccattatctattatccatccatgacccattaacccaaccactcacccacccacctacctatatattcatccatccatccatccatccatccgtcacccatttattcatctatccatccattcactcatccatccatcacttattatccataaccgatccacccaaccactcactcatccatccatccacccatccatccataatttattcattcattcatcatctatatccatctataacacatcaacccgctcacttatccatccatccataattcattcattcatcatctattatccatccgtaacacgtccacccacccactcttccatccatccatccatccatccatccatccatccttattcatccattttcatcctccccaaactcatactaataggttgcacctctaacatccaaggggctcaagtcagaaaccctggaatcaatctcaagtcaactcttttcctcacatttcaccatcagtcctttagaaaatcttgttggctctgccttcaaatctattcacaacctgcctacttctcgcccctcttttacatccccaggtccagccccatcattgcctgcctggaccagtacagttgcttctgccctggtcctcacctcccctgctcactaacccatcagaccgttcccccctcagcagccagagggcgcctgtgagcacctgagtcaggtcctgtccctcttctgcccacagccctccatggctgtcacctccctcagagtcaaaaagcaagtcctctctgcggcccacaaggctctgtgtgacctgccttgacacctcctcctccgtctctttcccttgctcactgtgctccagccacagggttttcctcaatgtttctccaacgcaccaggtggggtcctgcctcagggcttccgcgtgggctgtgccttctatctccctcccccacctccacctcctttggtctctattgaaatggcgcttctcacagagacctcccctggccacttccccacatttatctccgtcagagtctgttctcctttactgcttgtttccagcccaccccaccccccgcccctcacccttagctcttaccaccatctgaccccctgtat[139 bp omitted]cctcagcctccccagtagctgggactacaggcgcccaccaccacgcccggctaattgttcgcatttttagtagagacggggtttcaccgcgttggccaggttggtttcagtctccagaccccgtgatccacccgcctcagcctccccaagtgctgggattacaagtgtgagccacagtgcccggccacttgtgtatttttgtcttttagacagagtctcctcctgttgcccaggctgaagtgcagtggtgtcatcatagctcactgcagcctcatactcctgggctccagcgatcctccctcctcagcctcctaagtacctggaactataggcacaccaccatgccctgctaatttttttttcagagatgggatcttgctatgttgcccaggctggtctcaaactcctgggctcaagtgatgctcctgcatcagcctcccaaagcattgagatcacatgagtgagcagctgtgccccacctacttgtgtgggggggttttctttgttaacatgtaacatcagctcttcaaaacagagatcttcattctgtcaaatttgctatttcctctcagtacctagaacagtgtctgactcagttaataggtgttgaataattaaatatctaaagtaagccccaacccattcgttgagcacccactattgccagatgctgaaaagcttgtccagaaaaagagaaagtggctaaacccatgcagagaccacaccccaaaccagttcagaaaggcggatcacctccaaaatgtggcaacaagaaaggaagtctgccggttgcagtggctcatgcctgtaatccctgcgctttgggaggatgacacaggaggatcacttgagtccaggagtttgagaccagcctgaccaacatagcaagaccccatctctaaaaaaatttttaaaaattagctgggcatggtggtgcatacctgtaatcccagctgctcgggaggctgaggttggaggatcacttgggcccaggaggttgaggctggaatgagctatgatcataccactacactccagcctaggtgacagagttagactctgtttccaaaaaaaaaatcccaaaaaacaaaaaaaggaagtcctttccgtctgggctttccttgcctcctactctgagccactagtttcttcaggcatcctgaagcgtggacttgcctcccgtttgctgcacacgggcccccatccctggctctgctccttctctcacaccctcagttccctagtttgaggaagtttttcttccgagaacgttcacgcaagcctttcgcaccctgggccagcgacacgtgagcctagaaaaaagcttaaaggtcaatgtctataactgaattttcctctatataaaaatagcatctttgtaatcgtttaaatggctctgagggagggagagagggagcgagagagagaatgagggagaggacgagaggcaccgagggatgctgtgtctcccagccagcaggtgcatgtgcgagggcatttgtatggatacgcgtgtgtgtacatgtgtctatgtttgtgtgtgcatgcacctgtgcacatgagctcacgtttgtgtgaattgtgagtatgcatatgtgcatttcatgtgcatgtgcatgcatgttcaagttttgtgtgtgcatgtgtgcctgtgtgcatgtgtgcctgtcattgttcacgtgcatctatgtgcacacatgtctctctgtgtgtatgtctgcctacaggcatgagtatgtgagcgtgcatctgtgtgtgcaggcatgttcaatgcatgtgtgcacacatgtctctgtgtacacatgtgcctaagtgcgagtgtgtgtatgtatacacatatgagtccatgtgtccatgtttgggtgtgcatgtatatttatgtttgtgtgaattgtgtgtgtgcatgcgttcgtgaatatgcatgtgcgcacatgtgcttatgtgcatctgtgtgcatgtgtgggtttgcatgtatgtacatgtttatgtgcttgtgtgtctcttgtgtgtgcaggtctgcctacatgcatgagtgtgtgagtgtgtatctgtgtgtgcaggcatgttcaatgcattgtgcacacatgtctgtgagcacatgtgcctaagtgcaagcatatgcatgtatacacatgtgtgtccatgtgtccgtgcttgtgtgtgcatgtatgttcatgtttgtgtgaattgtgtgtgcatgcatttgtgaatatgcatatgtgtgcatgtgtgcacatgtgcttgtgtgcatgtgtgtgccagtttgcatgtatgtgcatgttcctgtgcacatgcgttcacatgtaatgatgtgcacatatgtctcatgcgtgcatgtgtgtgcatgtatgttcatatgaatgtgtgcactcatgagcatgtgccacatgtctctgtgtgcatgtgtgcatgtatgcctacctgcatgtaggcacccgtgtttgtgcatgagtgtgtgcacaggtttgttttgtacacactgtctgggacctgccttaagcttcaggtgtccattccccattccaccagagtggctgcctacacttggaaaatgaacaggatctggtctcaagccttcctgagctccaaccagccctgcctgagcgaccttgggtgtatcatctgtcctgctgagcctcacattttccccacgtaaactggcgtgtggggtgagcacagccacagagagctcctctggctgagtgccgagtctgtgaggaaccggagctgggggttcagctgcagttggagctcgacctggatgaatggatggcacatggaggatgctggtgagtgacccaaggaggggtgagtgaggtgggtgtgggcttcttctctgggcctcggtttcccctccttaccctggagagttggactcaagcctctcttgatccttctagtgaaaagatcccacacttggctgtatcggggttcctccttctgtcccgcattctcaaatccccccacctcattcttgagtgtggcctgggagtgaattggaaaggctctctctgggcctcagtttccccagccataatagagaaaagtcacttagatgggtccagaggaccatacccctctaacattcaggaatgtcctcatggaaatacatttcctccctactaactttcaacagaggaaagtttatcgtcatctgaccttgcctttttgtttctgtttttgtttttttgagacagggtgtcactctgttgcccaggctggagtgcagtgatgagatctgagcccattgcaacctctgcctcctgggttaagcgatcctcccacctttgcctcccaagcagctggattacaggcatgcaccactacactcatctaatatttgtatttttagtacagatgggatttcagcatgttggtcaggcaggtcttgaactcctgacctcaaagtgatccacccccctttgcctcccaaagtgctgggattacaggtgtgagccactgtgcctgactggagtgcttttctcccaagagatccacttgagtcctcccttctcctcttcaaatctttgctcaaatgtcacctcctcagagaagccctccctgactaccccagctaaagaaaccatgtctccaccactgtctacaccctcaccctacattatttttcttcatagccctttcaaaaccattcattatcttgtacctcgatgagtgaccatgcctcatcaactcgaaggcagccatttttgcctgtctttctgttgcaaattccaaagcctagaacagaacttggcacacagtaggtgctcaagaatacttgttgaatgaatgaatgaatgaacgaataatggaaggtaggaggctatgactgcccattcacagatatggacacagtggttcaggaaacgaacgtcactcagtccaagtcccacaatggtcagtggcaaaagtagggttcaagcccagctggctcgtccctcctgttcttcctcccactcatgccccaggtctgaggggctgcccagctgctgctagcaacctggcttcgacctccaaccattgatccaccagaggctgctctgtgggatgcacttcctgatttagctaaaacaccctgcgctggctacagcggggtgatcgatggccctacagtcagctcaggcacccccaacgcagacacatacatttgaggcctctctctagcccttgcccctgcaatcccaggctgaggtggtcctgctggcgggaagtggatggagcacatgtcgtgtggttctagatggcggtggccacatctcctgggcacctgtattctaccaagaggaaggggaaaagttactgcggtcaaggaaatggaaaatcaaaaccagaacaagatcttgcttcacattgatcagattgggtaaatgagggggaaaatggatgagattaactattgatgagggtgagggagatgggactcatggacagctagtgagccaaggaatggtgggcagcttcgcagcatcaaataaaactgcgttgcagcaactctacccagatctctaacccagagaagatctacatgcgtgtgcaaagacgcctgtttgctaatgtgctctacggagtcatggtggataaactatagaaggtgcatcttatggaaacatatgcagctgttaaaaagaaagagggcccttgcgtggaggctcatgccttgtaatcccagtgcttcaggaggctgaggtgagaggaagggttaaggccaggagtttgagaccagcctaggcaacatagtgagactccatctctgctggaaaaaaaaacaaaaaacaaaactttaaaaattagccaggcatggtggtgtgcacctgtagtcccagctacttgggaggctgatgcatgaggattgcttgagcctaggagttgaaagttacagtgagctatgattgcaccactgtactccagcctgagtgacagagtgggaccctgtctgaaaacagaagaacaagaggaagaggaagaaaaagaagaaagagaaggagaaggagagggagagggagagggagaaggagaggaagaggaagaagaaggagaaggagagggagagggaaaaggagaaggagaggaagaggaaggagaaggagaagaagaaggagagggaggaggaggagcagagaagaaggagaggaagaagaagaagaagaaggaggaggaggaggaggaggaagaagaagaaggctgatccatgtatcctgtcctggcaagggctttttagagacaagtaccagaggtcacctaggctggaatgcattggcgtgatcttggctcacgacagcctcaaactcctggactcaagtgatcctcccacctcagcctcataagtagctggaactaccagtgaacaccaccaggcctggctaatttttttttttttttttttttgacagagtcttgctctgtcgcccaggttggagtgcagtggtagtagctgggactacaggtgcgtgccaccatgcccggctaattttttgcatttttagtagaaatagggtt[143 bp omitted]gttgcccaggctgatctcgaactcctgggcccaagcaatcctcccacctcggcctcccaaaatgttgggatgtcaggcaagagtcactgcacctgggcagaatcaccagttctttgatgcccatgtctgcactcctactctctctgtcctcatttgttcatttattcactcaacaaccgttgtgtgcatggccccgttctagacactgaagactcagcagagatcaagagagacaatatttcctgtacttctggaactcatggaagctggagagagacagaatttgcaagtaagcaaaataaatcgatcatttcattgttgttgttgttgttgagatggaatctcactctgtcgcccaggctagagggcagtggcgcagtcttggttcactgcaacctccaccttccaggttcaagcgattctcctgcctcagcctcctgagtagctgggactacaggcgtgcacaactacgcccagctaatttttgtgtttttagtagagatggggtttcaccacattggccaggctggtcttgaactcctgatctcaagtgattcgcccaccttggcctcccaaagtactgggattacaggcatgagccactgcaccccgccaaaaatgatcatttcagacagtgataactgatgaacagaagtgaaactgggtgaggtggaaaaaagtgataggttggagggatgcagttttagctggggtggtccgggagggcctgtctgaggaggtgacatttgagatgagacctgaatgatcagaaggagccagctgtgagaacatgtggaggaagggtgttccaagtagagggaacagtctgtgcaaaggccctgaggcaggacagtgcctggggcattggaggaacagtgaagaggcctgtgtggctggagcagagtgaggaaggggagagagggagaaggggagggcagggaaggggcaggaggacaggtcatgcagggccttgtgggttgcaaaaaggacttggggccgggcacggtggttcacgcctgtaattctagtaccttgggaggccaaggtgggtggatctcttgagatcaggagttcaagatcagcctgaccaacatggtgaaactctgtctctactaaaaatacaaaaatgagccaggtgtggtggcaggcacctatagtcccagctactcctgaggctgaggcaggagaatcgcttgaacccaggaggcggaggttgcagtgagccgagactgtaccactgcactccagcctgggtgacagagcgagactccatgtcaaaaaaaaaaaaaaagggacttgggctttgaccctgaggaaggtgggaaccatggggggctgcgggcagaggagggacaggccctgactcaggtgctcacaggcaccctctggtggctgcaatggggaggacagactgcggcaggtaagggtaggagccggggaatcaggactgaggcaactgcacgagtccaggtgggcagtgatgggggctggacctggtggagaccacagaaggaggaagaggatgaggttatacacattccacctcacctccctccaccatgagtggctcacctgcagggcagtggcatgtccccagcaccaccagcaccacaagctcatgaatccccagagtcactgcagctgcaaaactcttagctaggagtgccctcagaggcccagagatgtccagtgtcacccgcaggtcgcccgatgaactggatgcagagccagaacttgtgcccttggtgccacctcccctctggctcagctgtgctctgccatctcttccagggacaaagattaggagtttgtttactgatactatttttattgatctttttttaaaacaagtgctcagcaaaaaagatgcacttagccaaactgctcctatgatatctgtgggaattcctctaagctgtcccaggcgtggggactattgggtggcaaaagcacagaacttgatctcttcagatttctttttaatttattattattattattattattattatttttgagacggagttttgctcttgttgcccaggctggagtgcggtggtgccatctcagctcactgcaacctccagctcctgggttcaagcgattctcctgcctcagcctcccgagtagctggggttacaggagcccatcaccactcccaggtaattttttgtatttttagtagt[139 bp omitted]agttccaggatatatgtgcaggtttgttacataggtaaatgtgtgccatggtggtttgctgcacctatcaacccatcatctaggtattaagccctgcatgcattaactatttatcctgatgctctccctcccccgattcccccaacaggcctcagggtgtgttgctcccctccctgtgtccatgtgttctcatttttcagcttccacttataagtgagaacatgcagtgtttggttttctgttccggtgttagtttgctgaggatgatggcttccagctccatctatgtccctgcaaaggacatgatctcgttcctttttatggctgcatagtattccatggtgtatgtgtaccacattttctttatccagtctatcattgatgggcatttgggttgattccatgtctttgctattgtgaatagtgctgcaaagaatgtacacatgcatgtatccttataatagaatgatttatattcctttgggtatatacccagtaataggattgcttggtcaaatagtatttccgattccagatccttgaggaattgccacactgtcttcctcaatggttgaacgaatttacattcctgccaacaatgtgaaagcgttcctatttctccacagcatcaccagcatctgttgtttcttgactttttaataatcactattctgactggcgtgagatggtatctcattgtgtgtgtgtttttttgtttgtttgttttagacggagtctcactctgtcaccagg[178 bp omitted]tatagggtgatcagctcatccaggtttgcccaggactttcctgtttttagcaccaaaattccctcatcctagagaactcagctgcaaaccgatggttggttatgttacgatcacaaggaaaccatgtgagatactgagtaggtgggatgggggttcctcagatagagttggtaacagtttgtccctcatccggttatgcaaagagtcatcgtgataatgcatgtcctggtatatagtaagcaattaataaatgctggcttttggaggttgaggctgcagtgagctatgattttgtcactgtgctccagcctgggtgacacagggagaccccatctcttaaaaagattttttttatttaaaaaaatggtggctcttgcaaggcaggtgagatgttgagggcttgtcataagggcacctatttgtcggagggagtgtttcaagccccttctaaaaagcaaaaagtaggctgggtgcagtggctcatgcctgtaatcccagtactttgggaggccaaggggcagaacatttgagcccaggagttcgactccagcctaagcaacatggtgaaaccctgtctctaccaaaaatacaaaaattagtcaggcatggtggcgcatgcctgtaatcccagctacttgggaggctgaggcaggaggattgcttggacccagaaggcggaggttgcagcgagccgagatcgcaccagtgggctgcagcctgggtgacagagcgagacccggtctaaaaaataaaaataaaaaataaaagcaaaaagtgaccttggacagtccagctcaggatagaggaatgacactcacgctaagacccagtgtgttttcctaatgtaatatgcaagtcctctctcgctctataacattccatagctcccactgccctctagagtaaatccacccctctcccttacagaccccaataacctgtgtgactttgtcctacaactcctgaattacccttagcacccacccatattcccacctccagacctttgaatgcagttttctctactgagatacccttccctgcttacctggaggactcatacagagcccaaaagcagccctttccctccagaagttgctcccaccaataaacaactattcctggagcacctacttcagggatcagcaaacaacggccctgtgggccaaatctgtccccctacttgtttttgtaaataaagttttattggcacacagccatgtccattcattaacctgttgtctatggctgctttcttgctaatatggcagagttgaatagttgggatggaaaccatatggcctgcaaaataaaaaatatttacagccaggtgcagtagctcacacctgtaatcccaacagtttgggaggttcgggtggggggattgcttgagcccgagttcaagaccaacctgggcaacataaaaagaccccatctctacaaataatagtaataataataataataaattagcccagcatgttggcatgcatctgtagtccagctaccctggaggctgacgtggggggatagcttcagcctgagaggttgagatgacagtgagtcatgatcactccactccaccccagcctgggcgacagtgagatcctgtctcaaaaaaaaattttttttaaacaatctggcccttttcagaaaaaatttactgacctctgacctactaggtacctggccctgtgctcaggacatccaggacacaatggtgaaggagacagacacagctctgtattcacaggactcatggtttagtggggaagacagatgaaaaataaaattcatagctagcccacgaaatcagatgaacgtgaagtatggctactttattttatttatttatttatttatttatttatttatttattttttgagacagactattgctcttgttgcctaggctggagtacaatggcacgatctcagctcactgcaacctctgcctcctgggttcaagcaattcttctgcctcagcctccaagtagctgggattacaggcacccgccaccactcccggccaatttttttttgtattttaatagagacggggtttcaccatgctggccaggctggtctcgaactcctgacctcaggtgatccacctgcctcagcctcccaaagtgatgggattacaggcatgagccaccgcacccagccagccactttattttctataatttaacttaatttcagattccgagaccttcatccttccagtatctgtttctctcaggagttcactaactgagacagagagtagaacattggtgactggagactgggggagggggcggagagtgtttcatggggacagagtttcagtttgggaatatgagaaagtttaggagatgggtggtggtgatggttacacgacaatctgaatgtgcttaacaccactgggtggcatgctgaaagatgggtaaagtggcaaatctcattttatgtatattttaccacaataaaagaaaaaagacctggggggaagaaacaagtgaccaactgagagattattgccaaaaccataacaaaggatgtgaatatataaagagctcttacaaatcaacaagaaaaaattaaaaatgggcaaagcacatgaacaggcaattctttttttttttttttttttttgagacggagtctcgctctgtcacccaggctggagtgcagtggtgtgatcttggcttactgcaacctctgcctcccaggttcacgccattctcctgcctcagcctcccgagtagctgggactacaggcgcccgccaccacactcagctatttttttgtatttttagcacagacgaggtttcactgtgttagccagaatggtcttgatctcctgacctcgtgatccacccacctcggcctcccaaagtgctgggatgacaggcgtgagccaccacacccggccacagtgagatacttttaaaatgcattagactgggaaaaaaatcagtttgcccataggcagtgttgagaagtcatgagatgtggattcaatgtggatgctgaacaaacatcttgcctgtattgattcccaaactgaacatcttccctaggcttctctgtttgagtaaatggcacccattgtctaagctcaaaacctggagttgtctgtgcatccttcctctgcctccactgccaaaatatattctagcccccttcctctctctttcctcactgctactgcacaggtccaagccttcatcatttgtcatccatcctagtctcctattccacttctgcccactatgatctattttccccatggccatcctcagttcaaaccctgcaatagctcctgctgttagcacaaaagtatccatttcttgccacaggcaagatccttcaggatctacttcattccctccatgttagcctcccgcttcccactttccccacctgtcctctcctctccagcactcagatttcctcactgcactcttattataattattattaaggtttgtttatttagttattatactggtaaaatgtacataacataaaatttaccattttcaccacttttaactatatcattcaatggagttaagtacactcacaatgttgtgtagccatcaccactatttccagaacttatcatcattccaagcagaaactctgtacctgtttagcaataactctccattctcttttcccctcaacctcgagtaacttctcttctattttctgtttctatgactttctgttgctatgactttttttttttgaagcagagtcttgctctgtcacccaggctggagtgcagtggcacgatctcagctcactgcaagctctgcctcctgggttaacgccatttttctgcctcagcctcctgagtagctgggactacaggcgccgccaccacacccggctatttttttgtatttttagtagagacgggatttcaccatg[137 bp omitted]ttgtgtctagtttctctcccttcctttccttccttccttccttctttccctccctcctcctcctccttcttctttttcctcctcctccttcttcttcccctcctcctcttcttcttcttcctctgtttctgtctctttctctctttcttcgtttcctttcctttgtttctctctctctctcttttccttcttttttacttgagatggggtctcactctgtcacccaggctagagtgcagtggcatgatcatagctcactgcagccagcctcccaagtagctgggactacaggtgtgcaccaccacacccagctaatgttttaattttttgtagagatggggttttgccatgttgcccaggctggtgttgaactcctgcgcttaaatgatcctcccaccttggcttcccaaagtgctgggattacaggcagtagccactgtgccaggctagcttattttacttagcatgatatcctcgaggtttgcccatgtgtggcatgtgtcagaatccccttctattttaaggctgaataatatcccattgtatggatggaccacattgtgtttattcattcacccatccatgaacatgggctgcttccaccttttggctgttgggaatcatgttcgtatgaacatgggtgtgcgagtgtctgttagagtctctctttttagccgggtgcggtggctcatgcctgtaatcccagcactctgggaggccaaggcaggcagatcacgaggtcaagagatcgagaccatcctggccaacatggtgaaaccccttctctactaaaaatacaaaaaattagttgggagtggtggcaggtgcctgtagtcccagctactcgggaggctgaggcaggaggatcgattgaacccaggaggcagagattgcagtgagccaagatcaagatcatgccactgcacgccagcctggcgacaaagcaaggctctgtctcaaaaaaaaaaaaaaaaaacagtctctcttttcattgctttagggcacaaatcctcagggtttttttgttgtttgtttgttttttgagatgaagttccactctgttggccaggctggagtgcaatggcgtgatctctacccactgcaacctccacctcttcggttcaagcaactctcctttctcagcctcctgtgtagctgggactacaggcgcacaccaccacacctggctagtttttttttttttgtaatttcagtagagatgaggtttcaccatattggccaggctggtctcgaactcctgacctcagatgatctacccacctcggcctcccaaagtgctggaattacagacgtgagtctccacacctggcccctcactgtcctttgaacataccaggcatggcccctgccgcagggcctttgctctggctgtgccctctgtctggaatgctctcttccagatctttccatagatggctccttcttatctaaccgtggtaccatcatgctgacccagccatcgctctccaccaagatactggactcctgccaccgtggacaggacacatcatcacctccctacccagagaaatttcacactagcctggctgggacaacctctatcattccaagcccctctgcatgcccttgaatcctgcctttggacctgcttcagatgccagacacagccaaggggaaatcataaggaacacatcaatcagggtggatgacaattgacaataacaaaaacaataattacactaatgtcaacagcagttataaaacaaggcggtgggacgggcgtggtggctcacgcctgtaatcccagcattatgagaggctgaggcgggcggatcacaaggtcaggagtttgaccttgtgtcaggcctggccaacatggtgagatcccgtctctactaaaaatacaaaaaattacctgggcatggtggcgggcacctgtaatcccagctacttgggaggctgaggcaagagaatcacttgaacccaggagaaggaggttgcagagagctgagattgtgccaccgcactccagcgtgatagacagagccagactccgtttcaaaaaaaaaaaaaaaaaacacaaaacacaaggccgtgcacagtggctcatgctataatcccagcactttgggaggccaaggtggagagatcccttgagctcaagagttcaagaccagcctgggcaacatggtgaaaccctatctccacaaaaaacagaaaaagtagctgagtatggcggtgcactcctgtaatcccagatactcaggacgctgaggcgggaggattgcttgagtctggaggcagaggttgcagtgagcgaagatcatgccattgcactctaacctgggtgtcagaccaagactccatcaaaaaaaagaagaaagaaagagagagaaagaaaggcaggcaggaaggaaggaaggaaggaaggaaacagaccaggcgcggtggctcatgcctgtaatcccagcactctgggaggccaaggtgggttgatcacctgaggccaggagttcgagaccagcctgaccaatgtggagaaaccccatctctactaaaaatacaaaactagccgggcgtggtggcacatgcctgtaatcccagctactagggaggctgaggcaggagaatcgcttgaacctgggaggcggaggttgtggtgagccaagatcgcaccattgcactccaacctaggcagcaagagtgaaactccatctcaaaaaaaaagaaagaaaaaaaaaaacaattataaaatagccaccgtgcatcacctttctaccttgtgctgagcatggtgctaggtgccttatgtgtgacatcttattgaatctggagagatgaggattatcggtgcaccatttacaaatgaggaaactgaggctcagccagaggaaagcacctgcctaaactggcaataccaggactcgaacccaggtcagtctgctgcatacctaccaggcaagtgctcctagctcaagtccccagggaatacaattaagcacaaatccacatagggtgggttgtaaaggctggaatggggcaggtgcgtcccactggcttcctgtgatttgtccacagcagcaagtaattagttttttttgtttttctttttacttttttttgagactgggtcacccaggctggagtgcaatggtgtgatcttggctcactgcaacctccgcctcccaggttcaagcgattctcctgcctcagcctcccaagtagctgagactacaggcgcccaccaccacgcccagctaatttttgtattttttagtagagatgaggtttcaccgtgttggccaggctggtcttgaactcctgacctcaggtgatcagcccgctcagcctcccaaatgctgggattacaggcgtgagccactgagcccggcctaattagcttcttattccatctcctccttggtttccatatccgccatgcaggcgccacacacatccccattttacagatgagaagaatgaggttcagcacggagaaatctctcgtttgaggtctcctaggaggattcatgtccggacagccaaactctagtccccaaggcggcaccacctggccctgtgcctggctgctcggtggcattttgctttattatttcccaggcgccctgttaatcgtccgcaccaagcgattagcacgtcatttatatatggcctggtgtctaattgtccagaccgtggagctggtggctcaaaacctcccttcctaattgtcttccctgcacaattagtaccttgttatatacagctctgtggtcgtctgcacttctgcagtctaccggcctcgcttctaattgtccaggctctgtaattaatgcctcaggatagggcttcctttcttctctatgcagttacagccatacttattcctgcagtagggctggggaagtgtccaagggaggaaaatgcagcccctgactccagggaggtcattgtcaagtgcggaagatgacaggccaaaaacacatgatgcctgggagctacaaatcctggttgtagagtggggcactgaccaaaggtgccctctgctgggagagaggtaatggaagctgggctttgcaggatgtataggagtttgtgaggtggaaaagcattccaagaaaagggaacagcatatgcaaaggttcagatgttggaaagagctaagtgtttgagtgggtaaaacacagtaataaagtctggctggagtgtagaactgtaacaggggtaaatttagggagaaagaaggcatagaaagggctttgaacactacattgaggggctctgatcttatcttctgggaatctatgatgggatttaagcaggaagagagacttgatcatggaaaatttttttaaaaagaaacaatcaggccgggcacaggggctcaagcctgtaatcccagtactttgggaggctgagatgggcagattgcttgagcccaggagttttgacaccagcctgaacaacatggtgaaatcttgtctctacaaaaaatagaaaaattagccaggtgtggtggtgtacgtacacctgtggtcccacctactcaggaggctgaggtgggaggatcgcttgagcctgggaggcggaggttacagtgacctgtgatcttgccactttttgaaaccctgtctcaaaaaagaaagaaaaagaaagaaagaaggaaaggaaaggaaaggaagaaggaaggaaggaaggaaggaaagaaggaaagaaggaaaagaaaagaaagaagaaagaaagaaagaaggaaggaagaaagaaagaagaaagaaagaaagaaggaaggaagaaaaaaagaagaaagaaagaaagagaaaagaaaagaaagaaagaaaaattagctaggcgtggtggcacacacctgtagccccagctactctggaggctgaggtgggtggatcacctgagcctggggtggttgagactgaagtgagccgtgattgcaccactgcactacagcctaggtgacagagtgagaccctgtcttggaaaaggaagggaaggggaggggaggcgaggggaggggaggggaagcgaggggaggggaggggaggcgaggggaggggaggggaggggagatggggaggggaggggagtcggggaggggaggggaatcgggcaggggaggggaggcaaggggaggggaggggaagggaggggaagggagggaagggaagggaaaagagaaaggacaagggctcaccctggttgctgtaggaagggtaaattggaagaggagagaacagaggccatgagaccagggaggaggtgatccctgttgtctagagctgaatgtaaagtggactgaagggatcagaggccatgaaaatggaaaggagcggatggatgataggaatgggcagaatgtgggtactgaccattgatgggtgacaatgagggaggagaggcagctcacgcccaggtctttgagcaaatgagcctcattctagcaaatgttgtcttctgatttggagcacagaaaccagctcaggtttagggtcacaggtgtgagagccatccctaaaactgcaggaataaatgcgtctgcctagagaaagatacaacagggacctgtgagcaagaaaccaacatttgggccagcatgatggctcacacctataatcccagcactttgggggaggccgaggtgggtggatcacctgaggtcaggagttcgagaccagcctggccaacagggcagaaccccatctctgctaaaaatattaaaaattagccggatgtggtggcacgcacctgtaatcccagctactcaggaggctgagaatcacttgaacccaggaagtggaggttgcggtgagctgaaattgcgccactgcactccagcctgggtgacagagtcagactctgtctcaaaataaaaaaaaagaaaaaaaaaaagaaaccaacatttgttgtgacaagccaataagattcagaatgatttgttatgtggcattaacacagcgctcgctgactgctacaagtctccatcaactgatggagagttccccaaggccaggctccttttgacagatgagaaaatggaggccagggacatactcaacacttttcatcccgtctggaccagacccatctacacatctctgaaatctccagctaggcaggaatccggactcccatagctgctctgtgaattaagaaactcaaggggttccaataggttctgtggtaaattgcccatgaaagtaccagagaaaaccttgctcggaggggagaagatctgtgatgatatatctacaggaaggaaaaaaaaaaaaaaagatttgggagctcagcagcggaatgttctataagaaccttttaaaagcaaacacaggagacacgagcagtttttaaaatgacagacaatacgaaggaagataatatatttaaaacctatatcagttgttaacagaccataaaaatacagctacattaatctgagctgtctgtcatgggctctcagagcagctgtgtgattttatagtttcgctcctaccagttttcttgacagtttcacaaatacatctcaatttatttggataaggacaatagaaaaatattgctcctgttttttcattcattctttctttcttctccctcttcttcctctgccacgctccaaacagctgggagatcttacggggctggccgtaagggctggtggggagggggtctcttttatttttattttcattgttttatcccattgggagaaaagtttctgtgggggtttaccttccccactgagtctcaggcttgtggggaaatagccggattggcagcaattgctgctgtgtgtctgtggcccagtgtctcaccttctctgaggtttgttagcaaagagtctacacacacctgctcctgatttcagtttcttttttttttttttttttctttgagatggagttttgctcttgttgcccaggctggagtgcaatggtgtgatctcggctcactgcaacctccacctcctgggttcaagcgattcccctgcctc[213 bp omitted]gcctcatcgccaagttctgccctccttagtcatggcaaaatccataccctttagaatcctccatgtcccccctaccccaccctgtcttccctgccctcccccctctccatctccccattactcactctgctgcagccacacagacctccctgctgttcctccagcactccaggtacggtcctgcccaagggctttggcacgtgtggtgccctccatctgaaagtcctccagccatctccagggctgctttcttttctgtttctttcttcctttttttttttttttttgagatggagtctccctctgttgctcaggctggagtgcagtggtacgatctctgctcacagcaacctccgcctcctgggttcaagcgattctcctgcctcagcctcctgagtcgctgggattacaggtgcccatcaccacgcctgactaattttgtgtttgtatttttagtagagatggggtttcaccatgttggtcaggctgctctcaaactcctgacctcatgatccgcccaccgcggcctcccaaagtgctgggattacaggcatgagccaccgcacctggccctcctttctgtttcatctgtcagctcaaaagaccaccacctcctcaaagagccaccctgctgcaaccaccctgggctaacgaagcctcctgggtccctccattcatatcacatcatcttctgttgtctgtcccagcacttcactagttaaaaatagcttaggccaggcgtgggggctcacgcttataatctcagcgctttggaaggctggggtaggaggattgcttgagcccaggagttcaagaccagcctgggcaacatattgagacttcatctccacaaaaaattaaaaaattagccaggtgtagtggtacacacctgtagtcccagctactgaggaggctgaggtgggaggatcccttgagcccaggaggctgaggctgcagtgagccgtgattgcaccactgcactacagcctgggcgacagagcatgactctgtctcaaaaacagaaaagaaaagaggccaggtgtggtggctcacgcctgtaatctcagcactttgggaggccaaggtgggtggatcacttgagatgaggagtttgagacgagcctggccaacaggtgaaacctcatctctactaaaaatacaaaaattagccgggtgtggtggcgggcgcctgtaatcccaattactcaggacgctgaggcaggagactagcttgaatctgggaggcggaagttgcagtgagctgagatcacaccactacacttcagctctgggcaatagagcaagactctgttccaaaaaaaggaaaaagaaaataaattagcttattcatttgtctgaccctcacaccagactgagccctataaactcagaggttttttttttttttcttggcttcttgtgtttactggtacacagcaggtgctcaatacatgcttgtgaagggaagaattcaaggggaagtgaaagtgaacaggactctcctagcgaggggcatggctggggtaagggcttggaggtggggacttgtgatgggaacttgtgaactccaagcgtctgaagtgggagcccagccttctcccgttccatggtaagttttgagtttccacgtctcaccactcaagcatcacagatcccatctccagcaccgtgttggccactctgggaactgctgcctgtccccatgtggccccctccccgtgacagccttctggccagagaccacgggtgcctcctttgctccagccctgccttcctgcctctccagcggaggcatcccagacgatgctgctgccacagatgaaactcacttgatgctggggaaggcccggcacagatgtccccagaatggaacatctgggctgcatgttgctggcagctggtgggaaccaggacgctgtgaagtgcacccacatctctgggaggctgggtggccctgagccgcctcctggtcctgccatctgtctgcggccaaagattccctgatggtttctctgggttaaggacccagagaaaggacccagaactgactgtcatttctaatttctccatctccctccctccccacttccttccatcatcgagacctggggctgtcactcttaattataccctggatccaagcatattgctccagctcactcccactgccctgcccgagccagaccagcaccatcatttgcctgaactagtgcaatagcacctattggttaggtctcagctacttccctgacctggcctcctcttgctcttcctgcctcactaactctgttccagccacgctggtctctctgctgttgtttgaacatgccaggtatgcggaagcctcagaggcttcgcactggctgttccctctgcctagaatgatctgctccccagatctccccatggcttgctcctcctcatcctccaaatctctgttcaaatatcacctcctccaagaagcccgcctgatttcccttgcacattcaatctccatggcctctctgaccccaacttctccctctctgctccagctgcacgggcctccttgctgttccttcgacacaccagacacagtcctgtcccagggcctttgcctgggctgtgccctctgcccagaaccctcctctcttttgcctgggaaatttctgcttatcttcttagccccagctgcaatgtccatcccccagctcctctccccagactcccccagatcccaaggacctgggtgtgtctgtgtctggctgtgtctccacagcagcctggaaccccctaggggcccctttgtacacagctggtcacacaatggccatcttaaaccatttcctgacctgaattcacttttccttttcagatgtctctcagcctgagtttccttccagaatttccatgaaccagggggttggctgcagtgtctgtttgaaagatgtggctgggggtatgaagggactgccttgaagctgagttgacatggcaggctcaccttttcaacttggatggtcagtttccttggtgtggctttggggttcctgatgaaggttttaaaggggtcaaaagccccccaaaccatccccttggcagtgcccatctccccctctggctacccagggtctcatccctctctgggtatctccttcgtggtccctgtttcctgctcccatcccccagtgcagacgtcacttaagggggtattgaactacatggtcagaggcaaagacaagcctggtggctaacactgatcctggaaccacgtggcctgggttcaggtcccaggctgctgcttttgttcatagttcacgatcttgatctctctgggtctcagtttccctatctctaaaattgagataatggaggccagacacgctggctcacacccatgatcccagcacttcgggaggctgaggcaggagggtcacttgagcccaggagttcaagactagcctgggcaatatagtgagatccctatctctatgaaaaaaaacatttttttttaaattagctgggtgcggtgatacatgcctgtggtcccagctactcgggaggctgaggtgagaggatcgctgagtctagggggaagaggttgaggcagcagtgagctatgattgaaggactgcactccagcctgggcaacagagtgataccttgtctctaaaataaataaatacataaataaaatgggcataatggtaccttcctgttcactttatgttaaaggattaaatgagttcatacgtgtgtgtacctaaaacagggggttgcaaaccactgaattatcagctgctgctattcttactatttttaatttttccaatctcccagggctcaaccccagccacgctgtcctctgctcctgagtacagggtctcggcccctcagctcctactctgaagcagccacggctgctggaagaaggttctggaagaaaggggaggggctgcctggcggctgctctccgtgccacatttgcagagtgagccgaatgtatttacttagaacagaggtttttgttgtggactttggggagtttggcggggcgggggtgggggtggggagaggctgaaggtcctcccaccaagagagcccctctgacggactagagccgctccagcatcgccagggacgaaggaattaaaaatcaagaccccattccagacatgccacttcgcgttgggtggcggggaccttgaagaaacccctagaagtgaccccgggggtgacctttgcctgtagcctcgctcagccaatgaggaagcccactgtgggtgcttggaaaccgtttccatgacacccaggagccgccggtccctggaagggcctggtctgagggtgaggggctcggatcgggggcggggggcgagatgcttgctcagtaaccatggcaacgccagcagctgcgggaggcaggcccagctggcacggaggcgcctgcccctcttccctccccaccgtcccggctctccttctggcacaaacaggaaggctgagacccagggacacctgtcatccgctccaggttgccctcccggaatgagaactgcaccctatagagtgttaacactgggggctccggtggagcccggtgggggccgggtcttaggaagcaaagcaatggggccgggcgcgtggcggctcacacctgtaatcccagcgcttttggagaccaaggcgggaggatcgcttgaggcccggagttcaagaccagcctgggtaacatagtgagatcccatctctactaaaaatacaaaaaaaaaaaaaaaaaaaaaaaaaaaatttagccagtcgtggtatcaggcgcctgtaatcccagcttcttgagaggctgaggcataagaatcacttgaacccgggaggcggaggttgcggtgagctgagattgtgccactgcattccagcctgggacacagagcgagactctgtctcaaaagaaaaaaagaaagcaatggggccaggcctggtgcgtcacgcctgtcatcagagaggagggcggggggaggaagggaggaaggagaaaataaaaaagacaagacgagacaagaagaggtctggaagtcttgacagggaaaatctggagggcttcctgatggaggtgagcgtgtcccaagcttcctcagccagcaccagggtgagggtggccaccacatcagtgccccacctgttccaagatttatttaacattttcttcccaactgaatcatgtcctcgctagtgagtgtatttaaaaacagcagctctgcttccctgaaaatggagagccggttgcacctgccacaaacagaaggtgggtggtaaaactcacatgacagaaacaaaacgcagttatttcattctagtgaggtgtcgctgcctgcccgaggctgggagcctgcagcctgtgattgctttgcctaaaaagaggattcgcgagggctaggaaagggttaaactcccctgattacccagcagagaccctgtcctttaaatcatcagaaggaaggaaagaggactggaaaggggctggctgtctcaccctgccagctaatgctatttagaaacttgttgggggacgatgtgaaatcactctgggccctactagtgaggggaatcctgacctacagaataaggatttggttaggaggagaggaaaggggttccaggagtacagtataagcaaaggctaggaggaaggactgaagagaagacgtgctgctgggagagattttctctgatgttttccaacaagggaggtgttagggggaaagccgatgaacaatgaggtctgagtgagcggggacctgaggcaccatctggggctgtctgggaggaggaagtattatctgggaggtagaggaagaaggggagggaaagagcagcaagagaaggagccagtatgggggacattggtgagcaggtgactggcatgggcacccggaacttgatcctgctgggtactactgtatgaggcgtgattcagaggtgtcccagcagaggggcgagggagctggggtatttatcctccaacaccagccaatccttgtctgagggctgctcctaggggccagtccctggcacacatgggtccagtgcagtcctgaggacagagaatgccagtgggtagagggaagcaggtgctggcagctgggacccatctggggacatgggcagggtacctgtggcatctgcctcatccccttttacagacgcatccccaaggtcactcagcaatgtgaggatttgaacccaggcctgtgacatcaagttccctgctgtttccacatcaccacagtggctgaatctactcccttgagaagtgtctgaaaacgaaggattccaggctcagataagtttaggaaggtacctccttcctccccaaccttggagactcagatttgtatagtaaaggctctgacaagtcctgcagataaaggacacctgttgaacagtttcccaggtgagcagaaacataggctctttttttttccttcttttttgagacagggtctggctctgtcatccaggctggagtacagtggtgtgatcatggctcgctgcagcctccaccttctgggctcaagtgatcctcccatctcagcctcccaagtaactgggattacagggacgcaccaccatgaccggctaatttttgtattttttagtagagatggggtttcactctgttggcctggctggtctcaaactcctgacctcaagtgatcggcctgcctcggcctccctcccaaagtgctgggattacaggcatgagccaccatgcccagcctgggcccagtgtcttttctaccctcttcacagctagaatatagtgcctggcatgtgacagatgtcctgtgagctcaatttcctcaatggataaatgaatgaatgagtgagtgcagatcctcatacccaccttctggataaggaagctgaggcacggagaggttaagttgcctggatgaagagctgggctttagccacctgacaccccagaacgaaggtttttaatcctgatactgagctccccaagagagccagagcgtagggagtgagaaggggagtagcagtgaaggagttaactgctcccccactggattcatcaggccttgggtcactttgtgcccgaattcaagaattcacgtagagtttccctctcccctggctcaccccgcctccagggggaagcatattcgtttccatggcaaccatgttgtcggctgtccgactaggtctgagtgacagctactggggccagatgaagtcactcgccacccacactggagacagaggagccggcccagaagtgccaacaccagagacaggcttgaggggtttacctcgtttgccagcaaggcggggagctggtcagggcgggggaaaatctccctgctggccgacatcccaccatgataactccgtgccttggtgtcttaaagactctgctggctccagggcttccgagagagcttagatcttagctgtgtctgcctgagtaccctgaaggagagattgcatctgatctattttataacacccactcccagcactgaacctggtacacagtaggtgcctaataaatgcttaggacgcaagggagggaggaatggagggagggaggaagagatgatcagccaaagcactttaattcttacctaacactcaagttatcttccaacattccacttatcaggcaggcttctcttatcagttaaccttttagttatcagcctacactttagttgtcagctaacacctaagttatcagctaacactttacttatcagctaacacctcagctagcatctttgtcagaaaatttcaggacaagctgaaaaatggagaactgagcctcagaaagcaggattcttgctttcaaatccctcctcttcttcccgcctccaccccactgacccccacgaggcagaaggaactgattatggccaacacggaaggattggaggcagggaagggcaggttctgggatcagagagaattccaaagtgaaaaatgcatgctcaattcttaaggaaggatttttcaacacctgtggaactgtccaaagcctgaatggattgccctaagtggtagtgaggtccccatcacaggaggtaaccaagacaatctgtaaaaccatgccaggaaaatgatgcaggaattggagtagggggatcctgagactcctttctttctgactctatgattgggtggcagttctaagactctacacctgggattcagcagccattcacaagcttccacgatgccacaggtctacgccctcattctaagatctctcgattagtcctaggactgaccagttttgaaaacatttattgcccacatgctgtgagccaggccctcttctaggagctgggcaccaaaacataaaatgggccaggcacagtggctcatacctgtaattccagcactttgggaggccaaggtgggtggatcacttgaggtcaggagttcgagaccagcctgaccaacatggtgaaaccccgtccctactaaaaaataaaaattaaaaaatgcaaaaattagccaggcgtggtggcatgcatctgttatcccagctactcgggaggctgaggcaggaaaatcgcttgaacctgggaggcagaggctacagtgagccaagatggcaccattgcactccagcctgggtgacagaccaagactccatctcaaaataaaagaaacagttacaatgatgggttattccatccagtgccatgggcagagagcaagcagaggaggaggggctctgggagtgactacaggagaaggattctttttgtttttttttttttttttgagatggagtctcgctctgtcacccaggctagagtgcagcggcgcaatctcagctcactgccagctctgcctccccagttcatgccattctcctgcctc[134 bp omitted]ggcctcccaaagtgcagggattacaggcatgagccaccgctcctggccaggagactctataggtgatccagacacttgtgctgagacctgaagatgatggagccatgtaaccaaagggtgttcctggctgaggggaaatcgccagggcaaaaacccccgaggcaggaacatgctgggcatgcttacaaaacagcaaagaggccaggcctggtggtttatgcctgtaatcccagcactttgggaggccaaggcaggaggatcacttgaggccaggagtttgagaccagcatggtcaacatagtgagactctgtctcaacaacaacaacaaaaaaatttaggccaggcgtgatggctcatgcctataatcccagcactttgagaggctgaggtgcatggatcccctgaggtcaggagttcaggaccagcctggccaacatggtgaaacccaatctctactaaaaatacaaaaaaaaaaaaaaaaaattggcagggcgtggtggcgggtacctgtaatgccagctacttgggaggtggaggcatgaaaatcgtttgaacccgggaggcggaggttgcagtgagccaaaatcacaccactgcactccagcctggggaacagagtgagactctatctcaaataaataaataaatagatagatactttttttttttaaattagccagacctggtagtgcactccaaggctgatgtgggaggatcacttgagcccaggaagtcgaggctgcagtgagctatgatcacgccactgtactccagcctgggtgacagagcgagaccctgtctcaaaaaacaagacaaaaacaaaaacagcaaggagacagtagagggggattggagggtgtgactgaggaggggccatctgagttgagaaggagccagaagtgcaaagcgccaggagtttccaagcagagaggacagcacgtaccaaggaccagtggtgggaatgagcttggagacacggacacacagaatcagagacagaccgaaacaaagagacagagacaggcgctcagggacaccctaacagagacagacagacaaagagacaagggtctctcattggccggcattatgggttacatcgtctctcccccaaaaaacctatatgctgaagtcctcacccctcagaacctccgaatgtactggaggtggtacagatgtaactggagtagggtgggctctaatctaatacgactgatgaccttataaaaggggacaatgtggttcatgcctgtaatcccagcactttgggaggctgaggcgggggggatcacttgaggtcaggagttcgagaccagcctggccaacatggcaaaaccctgtctctactaaaaatagaaaaattagctgggtgtggtcgtgggcgcctgtaatccaagctactccagaggctgaggcaggagaatcccttgaacctgggaggcggaggttgcagtgagctgaaatcgtgccattgctctccagcctgggcaacagagtgagaagattccttctcaaaacaaacaaaaaaacgaaggggcagggggacaatgtgggcacaggtatgcgtgcagggagaatgctgtgtgaatatgaagttgccatctacaaaccaaggagaaaggcctgggacagacccctcccttacatccctcaagaagcagcagccggccaggcatggtggctcctgcctgtgatcccagtgcttttcagaggctgagatgggaggatgcttgaggccacgagctcaagaccagcctgggcaacagaatgagacctcgtctctattaaaagtaaaaaaaaaaaaaaaaaaaaaaaatacccaagtgtggtggcacaggcttgtggtcccagctactcaggaaggtgaggtggaggatcacttgagcccacgaggtcgaggctgcagtgagctgtgattgcatcattgcactccagcctgggtgacagagcaagaccttgtctcagaaaactgaaagaaagggaaggaaggaaggaaggaagggagggacgaagggaaggagggagggagggaaggaggaaggaaggaggaagagaggcagggaggaagggaaggaaggagggcaggaagaaggaagagagggttgggaggagggaagaaggaagaggggggagggaggcaggggggaaggagggaaggaaggaaggaaagaaggaaggaaggaaagaagggagggaggaaaggaaggaggaagagaagggagggaggaaagaaggaaggaaggaaggaaaaaagaaccagccctgctggcaacttggtttcagacttctagcctccaggactgtgacatatttctgttttttgttggtttttttgttgttgttgtttgtttttttgagatggagtctcgctctgtggcccaggctggagtgcagtggcgtgatctcggctcactgcaagctccgcctcccgggttcacaccattctcctgcctcagcctcccgagtagctgggactacagacgcccgccaccacgcccggctaatttttttgtatttttagtagagacggagtttcaccgcgttagccaggatggtcttgatctcctgacctcatgatccacccgcctcagcctcccaaagttctgggattacaggcgtgagccaccgtgcccagccgacacatttctgttatttaagccaccagttcgtggtcacaggaaactcacacatcaggtaagccagtgaattaacaaatgactgcactgtgggagtcagaacagttttgcaaagctccatgtcaactcaggccaacctcacctctaaatgggggaacagaatgcagggaatcccccagttcagaggcccaaaccttgcacttgtttctccagaaggagaaagagctggagattgctcactaagctgagaacttttctatgtcccattgcacagcatcctccccacgaccgtgcaaagtaggaactcactatcccttttacagttgaagagactgaggctcagagtgggcactgtattgggcagcttacgaagatgtcctcatttgatcccacttctggtactcctgcccttgtggaatctcttctccttcttataaaggataaaatacagttgggcgtggtggcttgcacctgtaattatggcttattgggaggctgaggtaggaggatctcatgagcccatgaatttgaggctgcagtgagctatgataccatcattgcactccagcctgggtgacagagcaaaatcacatctctttttttttttttttttttttgagacagggtctcactttgtcacccatgctagagtgcagtggcatgatcacggctcactgcagcctcagttcccaggctcaggtgatcctcctacctcagcctcctgagtagctaggactatatgcatgtgtcactatgctcagctaatttgtttaaaaaattttttttgtagagatggtggagggagggtctcaccctatttcccaggctggtctcaaactcccggcctcaagtgatcctcctgccttggcctcccaaggtgctggtattacaggcatgagccactgtgcccagcctcttgctagctttgatgaagcaggctgatgtggtcaggaggcccacatggcgagaacctgggtagcctccgccatcaaggaactaagtattgctgacaaccatgtgaatgtggaagcaaatcctaccccgttgagccttcagatgagactctattgctggccaacacctcgtgacagcctgaagtacaggacccagtcaagctatacccagattcctgatctgcagaaactgagatcataagtgagtgttgttttaagccactaagttttggggtagttttttacacagcaatagctaaccaatacaaacaatcagttgcctgaggtcacgcaacaaaaattaacagagtcaggctggttgccgtggctcaggcctgtaatcccagcactttgggaggccaaggtaggcagatcacctgaagtcaggagtttgagaccagcctggccaacatgggaaaaccctgtctctactaaaaatacaaaaattagccaggcttggtggcacatgcctgtagtgccagctactcaggaggctgaggcaggagaatcacttgaacctaggaggtggaggttgcagggagccaagatcacatcactgcactccaacctggatgacagagtaagactctgtctcaaaaaagaaagaaagaaagaaagaacgaaaaagagaaagaaaagaaagaaagaggaaaagaaaaggaagaagggagggagggagagagagagagagaagagcgcaaccaagagagagcgcaaccattctccctcacagggaagactgctggctgcggcaaaggatgagtgagaaggccaaaccctggggtttcctttcctctcctggcaccagggctgtgtcgctgtccgtggtactgaacggtgctggtaggagcggcttaagggagggtggagcatctcctgttccctgctagcagctccttggtagggagcctgcactgtccacatgcagggctgcgaaattcggggctttcaggaacttgcatggttctttcacagaaccacctccctggctccgagcttggtgacttctgctagcttgagcctctccttctggggaggctggcctcccaaatcccacctggccccaaaccctacctacccacgtgagaattcaggggatcctgggttgttggggtaacagacccaatcagttctctgtctctctgtctccttgtctctgtctttgcaactgtctttgtctctgcctctctctctattctctttctgattttttatttttctctgtggctttctttctctgcccatctctgtgtcttcctatctctgtgtgtatctgtctccctgtctctatctctgtcttgtctctctgtctttattcctgtctttgtctctctgtctctgtgtctctttgtttctgcctgtctctctattctttctttttgtctctgtgtctctgcccacctctgtctctctgtctctatctctgtctttgtctctgcccatctctctattctctttctatttgtctctgtctgtgtctctctccacctctgtacctctctgtctctgtccgcctgtctttctatgtctctttccgtctctctgtgtgtgtctctgtctcttcctctctttctggctttgtgtctctgcatttctttccagttctctctcttgctctccaccactctaaaagccacaaacccttctggctgacctgcaatgggcccaactttctccagccacctgaggagagggaaaatgaagcaaagaccccagccactcacccagcctgcattcaccacttataagcgacagggttttggggcataaacggcccttgaggctaactcctgccccagtccgcctctgcctcccatcatcccttgtcaccatctacacagtgacatgattgataggagatctttcactgcctctgattcccaagggccgctccccgctccacacctaaaaacaaacctcattagcccccaaacacctggaagcagggaacatgaggggtgtgaataatttattttgtgagtcattttaatattttataataattgcgaggagtcatttggtattgtgtagctgtttgagtgtcattaagacagagccaaggctgggcgcggtggctcatgcctgtaatcccaacactttgggaggccgaggtgggtgcatcacttgaggttaggagatccagaccagcctggctaacatggtgaaatcttgtctctactaaaaacacaaaaaattagccgggtgtggtggcatgtgcctgtagtcccagctattcgggagactgaggcaagagaatcgcttgaacccgggaggcggaggttgcagtgacctgagatcatgccactgcactccagcctgggtgacagagcaagactccatctcaaaaaaaaaaaaaaaaaaaaaaagaggaagggatgggccctgccaccagggtatcttggaatctatcgaggtgagccatctccaagggggcatgtggctgggggccaggctgaaggaagaaggcagcctcaaagcatattgagggtggccggatgccacttagtaatcggtgagcagtgaatgggccaagactgcagctctgtcttagtcctgtttcattcactcattcattcattcatgcactcattcaaactctcccccggggtcctttattacacttgaatcaagctcaaaccctccaccgtggcctaaaagacccccccaggctgggtgcagtgactcatgcctgtaatcccaacactttggaaggctgagatgggaggatcgcttgagcccaggaattcgagaccagcctgagaaacatagcaagacccctgtctctacaaaaactacaaaaattagctgggcgtggtggtgcatgcctgaagtttcagctacctgggaggctgaggtgaaaggatcacttgagcctgggagatcaaggctgcagtgagccatgatttgcaccactgtactccagcctgggcgacacagcaagacctcatctctaaaaataaataaataaataaataaataaataaataaataaataaataaataaataaaattataaaaagaataaaagggccgagcgtgttggttgatgcctgtaatcccagaactctgggagaccaaggcaggtggatcacttgagcccaggagttcaagaccagctaagcaacatggtgaaccccacctctatctaaaatacaagaaattagccaggcgtggtggcacgtgcctgtcattccagctactcgggaggctgaggtgggaggatcgcttgagactgggagatggaggctgcagtgagctatgatcacactgctgcactccagcctgggtggcagagcaagaccccatctctaaaaacaaataaaattataaaaaataaaagaccccctttcccttcaaaatccagccccttaagccttcatctcctctcctgcgccccattctgctccagccacactggcctccttgccactcctccaatgcacaagcaacttcccacccctgagcctttgcatttgcagccccctcctcctagcatgccctgccctggactcctcccgtgatgagctccttctcatccttcaagcctcagctcacacatcgcctcccggatctcacagtggtaggatttagagagggggcgtggggtaggagggtgtgcttggcagggagctccgtgtgggcaaggacttggtgccaagacggttgagactgaatcagctgaatatgaagatgggcaggtggagaggtgggtggggctgggaaaaccgggttgagggaaaagatgcctggaagaagaaggagaaaaaaaaaaaaaaaaaggctaggggctgggttccagagagcctcaaagatgaggatgaataatctgggctccatcccggaagaaaggacttgagaactattccttatttcttcatggagctgggtcacgctccaccttcactgctcattcctccgcatggtggattccgcattgtctcaagtccctccatgctcatgagcccaattctagccagtcacttgggccatttcttccctctagagaacctcattatgacccacactgatgtggcagaaaacgtctggcatccattaaaaaaatccatgcctcacttcccacaacgtagagttaccctgggaagtggctgcccacccatggactacatttcccagatgcccttgcattaggtatgatcatgtgacatgttctgaccaatgggatgtgggtggaaaggataagtattattcccaagtcaaatacgtcttagttccccacaaattaccataaatgtagtgacttaaaacaacgcaaaattattatcctagagttctggagatcagaattctaaaatgtggaaggttgtgtttgctctgaagactctaggggagaagctgttccctggtcttttccaggttctaggggctgaccacatttctaggttcacagtctcacatccctctgacctctgcttctggctttgctctttgatgctcctgctttcctcttataagggcccctgtgatgacgttggattcacctggaatctccaagaaaatctccccatctcaaggtctataatttaatcacacctgcaaaatctcttttgccatataaggtaataaattcacagttgtgagagttctttatgtattctaggtacctgttccttattagatgtatgatttacaaatattttcttccatcctctgggttgtctattcactgtctggatggtgtcctttgaaacacagcattttaaaattttgatgaagtcctatttatctggtatttctttggttgtttgcgctcttagtgtcatgtctaagaaactattgccagtcccaagatcatgaaacccctttgtttttttttccaagagttttattgttttaactcttacatttaagtctatgatgtattttgagttaagttttgtgcttggtgtgaggtagggattcaactttacccttttgcatgtggatatccagttgtcctgaaatcatttgttgaaaagattatttgtttctccattggattgtcttggcccttgttgaaaagcaattgaccataaatgtcagagtttatttctggattttcaattttctaccgtggatctaaaagtctatcattgcgccagtaccccattgttctgcctcccaggttcacgccattctcctgcctcaccctcccaagtagctgggactacaggcgcccaccaccacacccagctaattttttgtatttttagtaaagacggggtttcaccatgttagccaggatggtctggatctcctgacctcgtgatccacccacctcagcctcccaaagtgctgggattataggcgtgagccactgtgcctggttgatataaggtttctaatcagaaagtgtaagtccttcaacttcattatttcatttcaagatgattttggatactctaagtgccttgaatttccatataaattttagaatgatcaatttctaaaaaaaaagctgagattttaatagggattgttttgaatctacagatcggttaaggagtattaacaatattacattttctaatccatgaatatgagaggtttttatttaggtcttaaatttctttcaacaatattttatagtgctcagagtataaattttgcacttttctgttaaatttactcctaagtattttgttctttttgatgctatcataaagataatgattttcctaatttcactttcagattgttcatttctaatatatacaaatgcaattaactttgttttctccttttttttaattttatttttccaaatttttacacttaaaaaaaaaattgattcttggcctgggaagtcgaggctgcagtgagctatgatcacatgattgcactccagcctgggcaacagatagagactctgtctccaaaaaataacataacataacataacataacataacataacataacataacataacataacataacataaaatagttcagcaaagttgaaggatacaagaccacgacacaaaatttgttgcatttgcttgctcag[142 bp omitted]aaaccccatctctactaaaaatacaaaaatttgcttcctgggttcaagtgattctcctgcctcagcctcccaagtagctggtactacaggtgggcaccatcatgcccggctaatttttgtattttgagtagagacggggtttcgtcatgttagccaggctgttcttgacctcctaacctcaagtgatccacccatctcggcctcccaaagcgctggga[144 bp omitted]cccgagtagctgggaatacaggcgcctgccaacacgcccggctaattttttgtatttttagtagagagcgggtttcactgtgttagccaggacgatctcgatcccctgacctcgtgatccacccacctcggcctcccaaagtgctggaattacaggcgtgagccaccgcgcccggccgtgcctggccttttttatgtttttatttgaaatccgtatatcctctttggcgaagtgttgttcaagtcatctgcctgttttttggtgtttttttttttttttcctcttctgtttcgagacagagtctcactctgtcacccctggagtgcagtggtgtgaggacagctcactgtaacctcaacgtcttgcgctcaagcaattctcccacctcagcttccccagtagctggaacggcagacacgccccactacgcccagctaattttttttttaagaggtcaggtttcactattttgccctggtttgtcttgaactcctgacctcaagcgatcctcccatctcggcctcccaagtagctgggacttgaggcgttcaccaccacacccagctaattgattaattttttgtagagatggagtcttcctaggttcccctagatggtcttgaactcctggcctcaagcaatcctcccatctcggccttacaaaatgttgagatcacagctgtgagccactgcaccagatcactttttaactttttatttatagaaaaatgtacaatatgcagttgtaaaaataatacagaaaaacatggcagtaaatcggggtttttctgttttttgtttgtttgtttgtttgtttgtttgttttgagatggagtttcgctcttgttgcccaggctggagtataatggcacgatctcggctcactgcaacctctgcctcccggattcaagcgattctcctgcctcagcctcctgagtagctgggattacaggtgcttgccaccacgcctggctaattttgtatttttagtagagacgggtgtttctccatgttggtcaggctggtctcgaactcccgacctcaggtgatccgcctgtctcggcctcccaaagtgctggaattataggcatgagccaccatgcccagctggcagtaaatcttaatgactttgaattaggcaattatatgataccaaaagcagtaataaaagaaaaaacagattgattggatgacatcaaaattaaaaacgtttgtgttgccaactgataccatcgaaaaagtaaaagtacaatctataaattggggaaaataaacttgtatgcaaatgtgaaaagaactctcaaaactcaaaaataaaaagattaataacccaatttttttttttaacggattctcactctgtcgcctaggctggaaggctggagggcagtggtgcgatcttagctcactgcaacctccctctcctaggttcaagcgattctcctgccccagcctcccgagtaactgggactacaggtgcctgccaccacacccagctaacttttgtatttctagtagagacggggtttcaccattttggccaggctggtgtcaaacttccggcctcaagtgatctgcccacctcagcctcccaaaatgctggaattacagacgtgagccaccacgccaagcctaataacccaatttttgaaatgggcaagtgatctcagtaaacgtttctccaaagacaatatacaaatggccaatggtcacatgaaaagatgctcaacttcattagtcactaggaaaatgcaaatcaaaaccacaatgagataccacttt[138 bp omitted]atggcgaaaccctgtctccaccaaaaacacagaaattagccgggcatggtggtgcacacctgtaatcccaactactcgggaggctgaggcaggagaatcacttgaacccaggaggcggaggttgcagtgagccgagattgtgccacttcactccagcctgggcaacagagtgagactccgtctcaaaaaaaaaagttaaaataaaaaaatatgtgtatgcaaatctttttttcttttctttttgagacagagtcttgctctgtcacccaggctagagtggagtgatgtgatatcagttccaccatgaccagctaattttttgtatttttagtagaggcagggtttcactgtgttggccaggttggttttgaactccagacctcaagtgatcctcctgcttctgcctcccaaagtgctgtgattataggcgtcagccaccacgcctgaccccatgcaaaatcttaaggataaatgttgatagcagtattattgataacaattcaaaaagtgaaaacaatctgactctccatcaactgatgaacagaaaagccaaacgtggtccgtccacacaatggaatgtgtttggccatgaaaaggaatgaagccctggtataggttacaacgtgggtgaaccttaaacacatcatgctctgtgaaagaaaccagacacaggccaggcacggtggctcacgcctggaatcccagcactttggaaggccgaggtgggtggatcaagaggtcaggagttcaagaccagcctggccaagatggtgaaacccccatctctactaaaaatacaaaaattagccgggcgtggtggcaggtgcctgtaatcccagctactcgggaggctgaggcaggaaaatcgcttgaacccggggggtggaggctgcagtgagccgagatcgtgccactgcactccagcctgggcagagcaagactctgtcttaaaaaaaaaaagaaaagaaaaagaaagaaaagaaagaaagaaaccagacacaaaggccacatattgtatgatcttgctcatatggaatttccagaacgggcaaatccagacacagaaagtggacttgtgagtcgtggtggccaggggctggggaagagattgggagtgattactaatttggtttcttttttgtttgtttgttttgttttgtttgtttgttttgagacagaatctcactgtgtcgcccaggctagagtgctgtgacatgatctctgctcactgtaacctccgcttcctgggttcaagcaattgtcctgcctcagcctccaaagtagctgggattaaagaacccgccaccatgcctggctaattttgtatttttagtagacacggggttttgccaatgttggccaggctggtcttgaactcctgacctcaggtgatctacctgcctcgtcctcctaaagtgctgtgattacaggcgtgagccaccgcgtccagcctaattggtttatttctttcccttccttccttccttccttccttccttccttccttccttccttccttcctttctttcctttcttttccttctttctttcttctttcttttttacagagtctcgctctgtcatccaggctggagtgcagtgacgcgatctcggctcacggcaacatccgcctcccaggttcaagtgattctcctgcctcagcctcccgaatagctgggacttcaggtgcgtgccaccacacccagctaatttttatatttttactaaagacagggtttcaccatgttggccaggatggtctcgatctcttgacctcatgatctgcccaccttggcctcccaaactgctgggattacaggcgtgagccactgtgcccggccctaattggtttcttttagggtgactaaaatattctaggtcgggcatgatagctcatgcctgtaattccagcactttgggcggccaacgtgggaagatcacttggggtcaagagttcgagactagactagccaacatggtgaaaccctgtttcactaaaaatacaaaaattagccgggcgtggtggcgcgcgcctgtagttacagccactcgggaggctgaatcgagagaatcacttgaacccgggaggcagaggttgcagtgagccaagatcatgccactgcactccagcctgggtgacaagagtgaggctctgtctcaataaagtataacatagaacattctaagattatattgtaaagatggttgcacatcatctcagctctgtgaatttactaaaaaccactgaattatatacttcaaatgggtgacttgtatgatatgggaattatttcaataaagatgtttttaaaaaaagtaaaaaatgagtacagagagatctcttgtgcctttaaccagcttcccccaatggtgacatcttacaatatcataaacgggaaatgaacattaacataatccatcaaccttattcagactttgctggtttatgtgcactcatttgtgtgtgtgtgtgtgtgtgtgtgtgtgtgtgtgtgtgtgtccatgcaacatttagatgtgtagtttcacaatcaggacacacaacacattccattatgaggatgttctgtgctgcacttttttttacgtcacaaccatctctctcttcctcctacctgaaaacccttaccattcttcatcttataattctgtcatttcaggaagcctgtatcagtggaaccgcatgctctgtaaccttcagcttttgttgttgttgttatgtatttctttttaattacgtgggtacatcgtggtgtatatatatttatggggtacatgagctattttggtgcaggcatgcaacgtgtaataatcacatcatgaaaaactgggcattcatcccctgaagcatttatctttcatgttaggagcaatccaattatacctttatagttattttattttgttttatttaattttattttgagatggagtctcactctgttgtccaggctggagtgcagtggcacaatctggggtcactgaaacctcctccttccagcttcacacaattctcctgcctcagcctcccaagtagctgggattacaggcacctgccaccacgtccagcttatttttgtatttttagaagagacagggtttcgccatgtcatccatgctgctcttgagctcctgggctcaagcgatcctcccacctctgcgtcccaaagtgctgggattacaggtgggagccaccccgcctggcctctttttgtcattttaaaatgtacaattaagttattattgactggctgggcacggtggctcaagcgtgtaatcccaacactttgggaagctgaggtgggaggatcacttgagcccaggagttcaagaccagcctggatgacatggcaaaaccccttctctaccaaaataactacaaaaattagccaggtttggtggtgcatgcctgtagtctcagctactcgggaggctgaggtggaaggatcacttgagcctgggagacagaggttgcaatgaatggagatcacgccactgcattccagcctggacaacagagtgagatcctgtctcaaaaaaatacatatattattgactatagtccccgcgttgtgctatcttactaggtctcttactcattcatcctttttttcttttttggacctatgaaccatccgttggacctcaccactccactcctctataacctttgaagactggctcttgtcatttcagcacagctcccgtgagagccaacctaagttgctgcgtttctcaatagttccttcctgttcattgctaagtagaattccacggtctggatggagcacaatttgtttaaccgttcacctgttgagggccatttaggttgcttccagcatttggccattttagaaggaagctgctctgaacattcacttctgggtttttttgtttgttttttgttttttgagacagagtctccctctgtcacccaggctggagtgcagtgatgtgatctcagctcactgcaacctccgcctcccaggttcaagcaatcctctgcctc[222 bp omitted]cctgggatataaatgcccaagaatgtaattccagggtcatatggtaagtgcatggtttgttttgtacaacaaaacaaaacacagtacagcaaacagaacaaaacgaaatcctgccacactctttttccacagtggctataccatttcacatctctgccagcaacataggactgagtgatctatttggtcttcatccttgccagcatttgatgtgatcaacttttttttttttaatttagccattttgatgggtatgtagtgatacctcattgtggtttggatttgcaggtccctggtggctaataactttgaacattctttcatgtacccatttgccatctgtatctcctcttcagtgaaatgtcagtttccgtctatgtccatattttaattgggttgtttgttggtttttgttttttttttctggagatggagtctcgctctgttgcccagactggagtgcagtggtgctatctcagctcactgcaacctctgcc[134 bp omitted]gctatgtgatttgcaagtagactcttccaaaccatagcttgtcttttcaccctctctaacggtatagtcttttgcatagagcagaaatcattaatttggatgaagtccaattcatcagtttcttcctttatggctcattcttgggtgtcatccctaagaactctttgcttaacctcatgtcttaaagattttattttgttttgttttaaggagcagagagttcaataggcaagaaggaagaggaaagaaggaagcagctccctatagagacacagcaggaggggaggctccaaagccaagagaggagaccctattgaagatttttttctcatgttttcttctacattttacatgtagacctgtgtgatccctttttttttttttttttttttttttttttgagaccgagtctcgctctgtctcccaggctggagtgcggtggtgtgatctcagctcactgcaacctccgcctcccgggttcaagcgattttcctgcctcagcctcctgagtagctgggattacaggcatgcatcaccacgcctggctaatttttgtacttttagtagagatgggttttcaccatgctggccaggctggtcttgaattcctgacctcaagtgattcacccacctcggcctcccgaagtgctgggattacaggcctgagccaccgtgcctggcccctgtgatccgttttgaattccattctgaatgtaaaaaatagcagaagcgggtttgattcgggggaccctagggagccaatgagggttcttgagtgagagaagatacagttggcaagaagaatcaggtgagtagactcaagtagcccatgacagcctcgctctcagcctcagtctccccccaccggcaaactaacgagaccagaagatctctaaagtccgctgtcatcaaatgaggccacctccctggacgtttgtccccatattccctgcgcctctggagcagactcaggtcaaaccccagcgcctgcacaacgtgtgtgagcctctgtgtcccagtgctttgatcttaagagtgactcagtgggacagcgccgagagctcactcgaccccaaaaaactgtggctcttttttctctcagacggcaaaatcaggtcatatttcaattccagtcattctccttcatatataaaatgtgccaagaaccactttcccgaaaatctaaattgaaagtaaatagcacgggggacaattctcggtgataaaactgcggattctggagcttcttgggataatatttattctcccttcttgctaatggctccagctgcctccccaggttattaaagtaatgcgtttgcttaacctgactggggccgcatcccaccctgggctgattgggccccgcgtgaagccccccgccacccccctccaccggacaattatattaacggctgctggtttgcaattactataaatcagaaagcgcgtcggcctgggtttgtttttctttattgaaaatgtttaaacctcatgcattgcaaatatcaccgcctcagaccgggatttaactctttccttgagacttggaggtacagctctggagggctttgctggggatagtgctaggataatccctgctttctgagatgaggaaattgaggctcagagaaggaatgccatttgcctggggtcacacagctggtgggtcactgcactgaaacggcactgagttttttgtttgtttttttcatgcctgatgaagttacattctttgtggcaaatatttaaaaatgttgagatctgttatctcagcaaaaaccacccccagttctgcgggggtgggtgggtgtgtgggtgggatatatccttccagagatttttttttctatgcatatatattctggcatgcaccaaatgaatgcaggtttaatgaattatgccttccataagcaccgaggtgtttattgagcacctactgtgtgctgggtgctgttttatgtgctggggatacaggaagcaaaacaggcttatctgccggtagtttcaagcataggggacagccagggcaaggaccctgaggctggctcttgcctggcacacaaaggggcgaataagcacaggcgtggagagtgcaaggggcaaaggcagggagggtgaaaagagcattccgtgtggaatcagagggagaggagagggcttcatggagctctccaaggtagagtgctgaggtttgctgaggatgtgggtgggaggaagaggaggcagggagaccccaagattccctctgagcagctacaagggctgacctcagctgagatggggagatgcaagaagagcagtttagggggtccggtgcagcccgacatggctgtgttgagtgtgaaatgcccatcaaggccaagtttggagctggcggaggcccagactggagacaggactgtgggtatcagtgggtgtagatgggtttagagccccgagagttaatgaggccgacctggaagggtgtggatagaggagcaaagaggcctgagaacccagcccttgaccagcaatggacagagagagggacagaagagggacccagagaggtagaaggaaaggccagtgtttccaggaggggcggggcaccagccggtcagacgccgtccagagggacgaggaataggatggggcgggtcaacgctgacttctgtcagaggcgtttgaaccaggacaactccatcttggatagggactgggtaaaataaggctgagacctactgggctgcattcccagacagttaggcattctaagtcacaggacgagatagcaggtcggcacaaggtacaggtcataaagaccttgctgataaaacagcttgcagtaaagaagccggctaaaacccaccaaaaccaagatggcgacaagagtgacctctggtcttcctcactgctacactcccatcagcaccatgacagtttacagatgccacggcaacgccagaaatttaccctctatggtctaaaaaggcgaggcatgaataatccaccccttgtttagcatatcatcaagaaagaaccataaaaatgggcaaccagcagccctcagggctgctctgactatggagtagccattcttttattcctttactttcttaataaacttgctttcactttatggattcaccttgaattctttcttgtgcgagatccaagaaccctcccttgggacctggatcaggaccccttcgggtaacactttgacaagggcagcttcagtggcggaaggtgtgagaggccaggctgatgggtggagaaggctcaggagaaagaaagagaacagaagtgcagacagtgagtgtagacaactcaatctccaggagtttggccataaaaagaggcaaggaggtcgggcgtggtggctcacacctgtaatctcagcactttgggaggccaaggtgggtggatcacctgaggtcaggagttcaagaccagcctgaccaacatggtgaaaccccgcctctacttaaaaatacaaaaattagctgggcatggtggtgtgcgcctgtaagcccagctactcgggaggctgaggcaggggaattgcttgaaccaggaggcagagtttgcagtgacccaagatcacgccactgcactccaacctggacaacagagcaagactccatctcaaaaaacaaacaaagaggcaaggatatggttggtcaccggagggggatgtggaagtttactttttccctataagatgggacctgcccagcagagccagaagatgttaccgaagagaaagggccaagtgctgaagccaaatccttgggtggggacacagagcctgtgtttatcctgcctctattgcctactctgtaaaacaggcataagaacagtatccaggccgagtgtggtggctcacaccggtaatctcagcgctttgggaggctgaggcgggcagatcgcctgaggtcaggagttcgagaccagcctggccaacatggcgaaaacccgtctctactaaaaatacaaaaactagctgggtgtggtggtgggcacctgtaatcccagctacttgggaggctgagataggagaatcacttgaacccgggaggtggaggttgcagtgagccgagaccgtgcctttgtactccagcctgggtaaaaagaccgaaactccatctcaaaaaaaaaaaaaagaacagtatccatcacccaggcatgatctaggcacccagcaaaagtccaggctgatgacatgtctctctcccctgtggtgtgtctatgaaggggtcaccccctgctccagtttgtggcagaatgcagtttccctcctgacacccacccccaagggagatagacagtctccaggaaaaactcagtgagttccccctttgagaaagggccccacaagtcaaagtgctttttcaaaaataaatagcctgattagcataaggtatgcaaatgtatgctaatgtgacaactattaaaagatttcaaatgtcatcgagggaaaacacaccgggcctggctggaggggtgggggacgggaggagaggatgcagccaggactcttgagaaaggtcgaggggctcaaccgcaagatcaccaggatacacactcgtacagacacacacaaactcacactcacacccgggtcattccagggtggccttaagtcctctcctgggcagaatccccaaagctctgtctccaggtgtgagtattaagctcctggaaaccctcctccaaatctttcccccaacacactctaagtgcctgaaaaactgtccagggtgacaatgcgtctcattccaccaagagcacacagatttgttctgcaaataatctctgggaaaagcagtaacagcatgggtgacagaccccagagcctttcctgagaataggttaaaacggtagtctcatccatgacaaaaaaaaaaaaaaaaaaactcctaagaactggtaagagatggctcctatccataataaatcctccctcacttcaggggaaaattttcatccatatccactttgttttctgaggctgacagacaaaaatcagacccagaatggggagagacttttcccagggtcacacagctgtgtgtgtgaccaaaactatcaccaaactaatcaccaaaactatttggtgtgttgttgttgtttagagacagggtcttgctccattgcccaggctgcagtgcgatgctgctatcacaactcactgcggcctgaaacttcttggctcaagcaatcttctttgcgaggatctggcctgcagaccccagcttgcacgatggatgaataatgtacccagacactgatattcagtgaaagagcagctacgggtcgagccactcacagacaccacggaaggtgctgtaaagagtcagcagccacagtcccgactagctggccctgagggcatttatttagcacagttttgtttgtttgtttgtttgtttgtttgtttgagacggagtctcgctctgtcgctcaggctggagtgcagtggtgtgatctcggctcactgcaagctccacctcccaggttcacgccattctcctgcctcagcctcccgagtagctgggactacaggcgcccgccaccacgcctggctaatttttttatttttgtatttttaatagagacggggtttcaccatgttagccaggatggtcttgatctcctgacctcatgatccatccgcctcggcctcccaaagtgctgagattacaggtgtaagccaccacgcccccggcctgagcacagttttaacgacaaaggctttgagtcaacacacctgtgggtaattaatctggttgctcccaccccgggagagccatcttacccatgagtgatcagttagttttaggactgagtaaacaagcgcgttagacaaactcctctacattcctacgcatctacgccctgagcttttaagagaactcagctgccttcagccaagacttttgctaaagctatgcaaacctctcggccttccaagaaggtctgtgtttatttcctctaaaatcttttcctccaccctgactgaacccccacacctcttgcctcagcctcccgagtagctgagacttacagacatgtgccaccacacccaggctcattatttttatttttggagagatggggtcttgctatgctccacaggctagtttccaactcttggcctcaagtgatcctcccaccttagcgtcccaaagcactgggattacagacatgagacaccatgcctggccaccaaaactctttggtgagaccagaattattgaaatcattttcagatgagaaaactgaagatcagagatgtgaaatgatttgccccagctcacacagcaactgtgaggcaggtcaggtcagctgctcaaacttcagctgcccaaatttcaatccatcttacatcacctttctactacttctactattatttcctgaatatttttcttctaatggacccacttcttaaaaccttaaatgtatttagaaggaaattgtttatcatgactgtaaatgaaaagccagaatcactgaccataagtagaaactaacttaatgagaataaaatcatattattaatttctgacgaaagatagttgcctctgagctctgagctggagcctgatctctctctttgtccaaaaaggatatttcacgtgtccaagaaggtgttaaagactgattcacacccagttaagactttcttcttgcaaaagacatgcaaaggaagagctctctccctataagagtccgtggtgttaagactgtttcatgcatcacctaaaaccgtctcatggccaccaggctgggctctatctacctgaagggcaggaagactgtcccaataccttagagttctagaattatggccagggatctatttgggggctcatactatcagtgcccacggccatttcagtgcagcccaaagatggagaagagatggcttcactgataaacagactcacctgtccatccacctatccattcatccacctaccatccatccattgacccatcaatccacccacacatccatccatccacccacacatccatccatccacccactcaccacccctccacccactccacccacacatccatccatccactcatccatccatctgcccatccatccatccatccatccatccatccaccattcacccataacccatccaccattcatccacccaccatctgcccaaacatccatccaaccatccatccatccatccacccatccaccacccaatcatccatccatgcatctactatccacccaccacccatccatctacccatccattcacccaaacatccatccattcacccaaacatccatccacccacccatccatcttcccactcagccatccactcacctattcagtaaatatatatccagcaactactctatgccaggcattgttctagaatatggatacatagtggtgaccaagacatacgtggtcaccaaccccttgaggcttctgaaccagtgaggacactctccatccctcgagcaacaacatgaggcggattagagaatttttctccatttttttttgtgacaagggtcgtcttggtagatatttgtgggtattccctgaccttcattcttccctccacctgtaggacgcagaagcaacctggtttcgccgctgcctggctgctctccaaacccatttcctccttcttcagggcacatagcaaggtgtttcccagcattccttgcagttggggcagccatgtgacttaattgagccagtggaaggtgggcagaagtgatgtggccatgacttacgttctggcccaggctctttctgcaacctacactttaaagatggaggaggtacaagacagcggggcctgatccctgagttactaggtggaaacaaaggaacacctgtttgctctttatatgagcaacaaacttctgttgggtcattgaggcttgccagtttataatggcagggagtgttaccttaaccaatgcacacgtttcctcttttccaaccctgagagggaattggttccacctctggctccagccaatcactgaagcctattcctgctgacttcctgattagctcagcctggtcatgtgactgaaggacgcagatggcaatattggatgggtttctaggcatcatagcttggagggccactggggttgctggaaccaggacacagaactcgagaactgggcttctaacattcgccactgggaaagaaaaaaagaaatgtattatttattgttactattattttaatatcctgcaattgaaactggcctatttcctggatgatccaaatttaggaactttttcctgcagctttaatcatcctgaagatgccctgacttctgtctccacccagacttggccccagatctctctccagttcctcctggatgcctcctcttggaggtccagcaggtacatcctacccaactcccaatgcatcctttttatccccctccagcacctcctcctgtaaccccctccctgatggccccactctttttctggaaagttgtgaacaagcctctctatctccctttcttatcaacagccggccctgccaatttcacactcaccaagtcctattgatttcaacattactgtctccatggcagccccactctgtacccctatctgtgtttttcaatagacaccatcagctcctacaatagccttcttgatgggctcctagcatccacacagcagccaggaggatcgatcttaagtgtaagtctgacccttcccctctcccctctgtaactctccatggctccccagtgccctcaagagaaagtctaaactttattttcaaaattcttcatagtctagctacttcattcttccttgctccacccctgcttctccttgttcacctagcacctgctcatctttaaatgtcatccctcagggaagcttcacctgaccctgctctacaatgctgagaaaggagtcttcctgagctaccccagctgcctgagcttccctcatcacaggctgtaaatgcctggttatgtgtctttgaattcctagagggcaagggctggatctatttcaccactgtctccagccccccagcacagcatccagtgtgagcttaataaatatttctgaatgaatgaatggtgataagaaatcgaggctttgcgaatgctactgtgtgtagcagacgctgtgggcatccctactgcacccacatttcagcacctgccaacagcatccttctgcagtcacctgggtgagggccaggctggaagtgacagagaattgatgtctcaggaagcagcccttcaccagtgatggacaggcgctggtggataaatatcccacctctctcattctcttgggaagaacaagtgcatgctatacaccatctcccaagggtatccagtgggactgagcccagttgctcagggcagtcacctgctcataagtgttggttctttccttccttgtctcacttccccactctcctggggcttcctggatcacttcccacataaacaacttacccccaaatccttgtttcaggagctacttctggggtatccaacttaagacactgtagtgaaaatgagtctataatttactggctgccgcttccagggagaactttgatgtgtttgggaaaaaaagaaaaacaattgcctctttctccctgtcagctgtagtcctcacagcctccaagcaaagactgccacatttgcagttatgtattaattgcttttatttttttttttccccgagaacgggatgctctcctgcaatatgtgtgtgagagagagagtgtgtgtgtttaataactttctcatttgagatctggccggatagctttttgaagaaagtctacccagagcctggaacgtatagaaaattctcccggcttaatagcactcccacccgcccatccatcacagacgcactgtggaatgaaaaacgagcacattgattggatctatttctaatcgacagcctgagatactgtttgaggtctgccattagacggaagaagttggtgtggaagtggctgtgtctctatttctcaagggcacggggtctggcgtgggggttgagggggacagaaataatcatggtagcatttagcaagcatttattgagtacctactgtgtgccagatcctgcaatgggtgctggtcattgagatagacccagctccaccctcccagtgggggagatgtacaggtcacttgtggcccacaatcagaaccatgatgggggagattcaggcagctctgggggcccagagaaggtgtctgacccagcctgggagatcagggagggcttcctggaggcagggacagctgagctgaaagctgaggagtcaaccaaataagaaatagggaagaagttggctaccgtggctgatgcctgtaatcccaacactttgggaggccgaggcaggatgatccctcaagctcaggagtttgagaccagcctgggcaacatagcaagaccccatctctatttaaaaaagaaataggtgtagtggtgcacacctgtggtcccagctacttgggaggctgaggtgggagaattgcttgaggccaggaagtcgaggctgtagtaagctatgattgcaccactgcactccagcctgggtgacagagcaggtccctgtctctaaaacaaaccaacagggtgggcgcggtggctcacgcctgtcatcccagcaatttgggaggccaaggtgggaggatcacctgaggtcaggagtttgagaccagcctggccaacatggtgaaaccctgtctctattaaaaatacaaaaattagctaggcatgatggcgggtgcctataatcccaggtactcgggaggctgaggcatgagaagtgcttgaacctgggaagcagaggttgcagtgagctgagattgcaccattgcactgcagccctgggcaacagagcgagactctgcttctaaataaataaataaataaataaaacaaaacaaaacaaaacaaaacaaatggggaagagtgttttcagggaggaagaacagcatgtgcgaaggcctgggagcaagtgaaggttacttagtgtggctgcagtatgcagtgggtggggaagaggaggcgtaggggagatgtggagggagaagttggcagtgctttgaggcccatgggacagggtttccacttttctggggacaatatggagccacagaaggatttagagcaggagagtgaatggcatttgctaaaaaaaaatcattttgacatagaatgatcgtatgattcaacaattccaagcagggactcacgtagatccttgtacatgcatgttcacagagcacgattcacaacagccaaaggcggaaacaacctagagtccacggatggatgaatggatgaacacagtgtggtccatccaaacagtggaatattgctcagccttaaaaagaaaagaagttatggctgggtgcggtgacacacacctgtgatccgaacactttgggaggccaaggtgggaggatctcttgagcacggaaatttgagaccagcctgggcaacatagtgaggccctgtctctataaaaaaataaaataataaaaataaaaataaaataaaaataaaaataaaaataaaaaatttatccgggcatggtggcgtgcacctgtagtcctagttacttaggaggtggagactggaggatcgcttgagcctgggaggttgaggctgcagtgagctatgatagcgccactgcaatccagtctgggtgacagagtgagacactgtttcaaaaaaagaaaaaagaaagaaatgggcttggcattgtggttcatgcctgtaatcccaccatttggggggccgaggtgggcagatcacctgaggtcaggagttcgagaccagcctggtcaaaatgatgtctctactaaaaataaaaaaaattagctgggcatggtggtgtgtgcctgtaatctcagctactcgggaggctgaggcaggagaatcccttgaacctgggaggcggcggtgtcggtgagccgagatcatgccactgcactccagc[222 bp omitted]gaggcaggagaatggcgtgaacccgggaggcggagcttgcagtgagccgagattgcgccactgcactccagcctgggtgacagagcgagactccgtctcaaaaaaaagaaaaaaaagaaaagaaaaggagttctgacatatgctacaaggtggatgaaccttgaaaacattatgctcaatgaaagaagcctactgtctacagaaggacaaatactgtatgattccacttatatgagatccctagaggaggcaaattcctggagacaggatgtagaatcaaggttgccgagggcaatggggagttatcgcttaatgcttacagggtttccttttgggctaatgaaaaatttttggaaatagtggtgatggtcgcacaacattgtgaatgtacttactgccactgaattgtacacttcaaaatggttaaaatggctagcctgggcaacataaccagaacctgtctctacaaaaaaaaaaaaaaattaaaatttgggctgggcacggttgctcacacctgtaatcccatcaccttgaaggctaaggcaagtggatcaatttgaggccggaagtttgagaccagcctggccaacatggcgaaaccccatttctgctaaaaatacaaaagatttgctgggtgtggcagcgtatgcctgtaatcccagctacttgggaagctgaggcacgagaatcacttgagcccctgaggcggaggttgcagcaagcctagatcgtgctactgcactccagcctatgcaacacagcaagactctgtctcaaaaacaaaacaaaacaaaaaaatagctgggagtggtgacacacacctgtaatcccagctactcgggaggctgaggtgggaggatcacttgagtccaggagttcaagggtgcagtgagctatgattgtaccactgcactccagcctgggtgacagagcaagactgtctctgagaaaaataaacataaaagtggttaagatggtgaattttatattatgcatattttaccacaatttttttttaaaagagagagagaaaaaaaaatgaataggccgggtgtggtggctcaggcctgtaatcccagcactttgggaggctgaggtgggtggatcgctcaaggtcaggagttcgaaaccagcctggccaacatagtaaaaccccgtctctactaaaaatacaaaaattagccatgcatggtggcaggtgcctgtaatcccagctactcaggaggctgagacaggagaattgcttgaacttgggaggcagaggttgcagtgagctgagatgacaccactgcactccagcctgcgagacagagcaagactccatctcaagaaaaaaaaaaaaaaaaggatgcaatcactttggctgctgtaggagatccaggatagagtaagtccaggaggtgctgggggttcagatcaggataagggcaaaggcgagggtgagaggtgggaggttgggggcgtggttggggtgtggcttgggcatggcttggaggcgaggctaacagggcgccagggagagatgagagtgaaatggaagatgaaagataaagcaggcagctgagttcctgcacccattctctcgacgcctaagcactccaattcacctgcaagtcttcgtggcctgacgtctccaaacccgccaccctttatggctcagcctggggtggcccctaacaaggagtcccaaatggggattgatgccacttcttcagtacaaagaaagattaaagcgacactgggtaaaaacactccatcccggccgggcgcggtggctcacgcctgtaatcccagcattttgggaggccgaggccggtggatcacctgaggtcaggagttcaagcccagcctggctaacatggtgaaaccccatctctactaaaaaatacaaaaaattagctgggcatggtggcggctactccagagggtgaggcaggagaatcgcttgaatacaggaggcggaggttgcagtgagccgagatcgtgccactgcactccagtctgggcaacagagcgagactctgtctcaaaaaaataaaaaataaaaaacaacactccatcccggcagccgttcctccacgtgcattcgcttacaaggtgcagatgtaatacctgcttttaaattcaattaagtcagaatcagttctgctcctagaatacattacccagttggagacagccgggggaagagggaaaaaaaaaaaaaaagatggcaaacaaacaaacaaaaaaaaaaccccacacacaaaacacaacgcagacctatttagagatttccctctaaatggattttaattctctcgatttatcagaggccagaggagctgctgacagcctgcatttggtgtctgcaaacccagtttcagccacagggaggggagaggagggatcgagtttatgttgtcattttcctccagtgctggaggtctggggtcgcccagagatgggttcaaatcccagctttgccatttactggctgcatgaccttcagccaagcaccgcatcctctcagagctttgacctactcatctggaaaatggagataatgacagggtttatttcagaagagccttgtgaatgatggcctggattatccaagaggattcaggttaaatcctcagcacaaggcttggcacatagtgaacgctcagtaacgcagggatgatggtgatggtgatgaaggtcgtcgttgttggtttttttgtttgttcgttttttgagacggagtctcactccgtcacctaggctggagtgcagaggcgccatcttggctcactgcaacttcggcctcccaggttcaagagattcttgtgcctcagcctcccaagcagctgggattacaggggtgcaccaccacacctggctaatttttgtatttttggtacagatgggggtttcaccatgttggctaggctggtcacaaactcctgacctcaagtgatccacctgcctaggcctcccaaagtgctgggattacaggcaggaaccgccacacccagcccactgttggtatttttttccaaccagagacccagccctgtgctaggttactgtagggaaagaaaaaagatgcatgaggctcaagtcctgcctttggaggctgggaggctttgggtaagcagggaagaaaggggtaggatggacacaggctcaggacagagaaggagccatcctgaggctacacagctcagagctgtccctttgcaggcctggatcctactcgtactgggttcagactctaccgtctgacgttgggcgagcaccccacactgggcctcagttgtaccatctgtagatggggaaggaaaagcgaagtttcctgagccaaaaggctcatctgtagggtcagatcagggggcgctgggacccccaggagggtgtttgtcttcataagagtctagcgaggccgggcacggtggctcacgcctgtagtcccagcactttgggaggctgaggcaggcagaggccgaggcaggcggaggc[137 bp omitted]tgaggcaggagaatcgcttgaacccaggaggcaaaggttgcagtaagccgagatcacaccactgcactccagcctggcgacagagcgggacactccgtctcaaaaaaaaaaaaaaaaaaaaaaaaaaaaaaaaaatgcctagtgagggggattttcacaccagaatcagaatcagaaagggttttaggacaaaaagggtcctggcctgtaatgtcccctggggagctcaggggggccatagttggctctcctaaagggttgcttcatccacagaaggcctcccttcatcccgggcccacggccctcatctgtgcctgccctgaaagggcaactggggagggtgggaggtgtcgaggacactctagtcccagaatcagggttggggggcagaggtctgacaccacggttgggaaggctaaagagaggcgcagtggcttattcctataatcccagcactttgggaggctgaggcaggtggatcaattgaggtcaggagtttgagaccagcctgggcaacatggtgaaacccagtctctactaaaaatacaaaaaattagccagccgtggtagagcttgcctgtcatcccagctactcaggagtctgaggcaggagaatcacttgaaaccgggaggcggaggttgcaatgagctgagatcgcaccactgcactccagcctgggcatcagagcgagactctgtctcaaaaaaagaaaaaagtacagttatccttgagaggatctaattgcgaggaggcaccaagggagcttctgagggttggaatgttctacgtcttgctgtggtggtagccaagggggtctatgtccatgtcacgattcctcaagctacacacaagatttgagcactttataagttatacatcattaaaaaagagggaagactcagagagg[141 bp omitted]tgaaactccgtctctactaaaaatacaaaaaaaaattagccgggtgtggtggcgggcgcctgcagtcccagctactcaggaggctgaggcaggagaatggcgtgaacctgggaggcagagcttgcagtgagccgagatcacatcactgcactccagcctgggcaagactccgtctcaaaaaaaaaaaaaaaaaaaaagaaacagagaaaagagagacaaagagataaacagaaactgagagacatagaggaaactgaaatataggaagagagagagagacagaggcagagagacaggaagagacagagagaagaaaagaaggaaaagaaggagtttcaaagcagaaaggtggggagaaatgaggaaattgggaagaagaactgaggactggagaagagaaagccaaagaagagggggggaaaggaggagaaaatagcaaatggcccaagaagtggcgggagagagtggctggggaggccaggaagccaggagctgtcacaggcgaacatgtccttaattgtaattacatgggaacatttagtttgtagatgcagcagaaatgaaaacgctgtgctttgcccattcatctaatggctgttagtcaaccactcttcaaaaagaaccccccacttctccgccccggggctgtggttgcatggggggcagcctgcggggagctgatcagaggagatggttttaaactaatgatgtcctcagggataccgagagggacagttctgggaagaatagaatttccccaccaaaaacccatggctggtgaatttctgagccctgcaaacagttaccagcccggaagtcagcagctggcgagtgggagttctaatctgcaaggctagattaggggagatacaatgtatccaagagagatcaaggttctttaactcaccctagcgggtgggggaagccttcctagaagggctgacatctaaactgtgcttaaatgtatactttgaggcaggcaagcaaaaaaggaaggaagaaaggccttccaaagagagagaacagcttgtgcaaaggttgagaaggaattacgcttacaaccatgagcgtgactgggtgggaagtggggcagggatggggatgggggtgtagctggggaagtcagcagagcccagaccacttataagacatgctgaggagatgggactttgtcctgagggcgatagggagtcatggagggttcacaacaggtgaacacagtccaggataatattttttaaaaattgggggccattcatatgatatttcacttactcaaaaagagagagcttcctggtcctggaggcatgcaaaataaggtcacactaaccacccggggtaccctgggggatttcaatatcaggtggggctgaggctgggactgcagaattggggttctcaggcaggagggcgaggtgctgagagaggtttgatgtgttactaatctcgcttggggggtacacttggccctctggctttgagacagtgaggagcagggggtgtggatgactcaggagtacagacgccagagtgggaggtttgagtcagcgcctagtgtatacctctcccagccactctcagctggaggtgactcactcattcatttggccttgaatgtagaggactggagtaggcagtgggggaaggaaaagaccacccaactatcccactactgtttacccctcctgccactgtgggtccagtcctgtgcaggaacgaccgatccacctcccccacaacccaatacttctagaatgaaatctgttggctccaaatagaccttggtcttgtcctctcctcactcctcctgtggttccagccttgacctggcaccatcgctgcttatctggatgagcagggtcacctccattctggtacctggctcccaccccgcagtctctcctccccacagcaagcagccagagagctcctatgaacctcctatgagtcagcgtccatccctcctctacccacagccctccatggcttccatctcccttggggtcaaagcccaagtccttacgaagtgctttttagccctgcactacctgccccatcccttccccaccctctgctcccctcctccctctctccccctcctcactctgctccagccacacaggcctcctcgctgttctgtcagacttagcgctgcctcgggacctttgcacgggctggttccctccacctggaactcttctcccagttttccccacagcttctttttattctccttaaacatcacctcctcaggaaagccctccttgattgctggtctaaagtaacatccaactcactctccacctcatgcccttgtttttattttcgtcatttttttttagtttgcttgtatggtcttttgaaatgacccgctgtatctgtttttccccaccagacctcaccgtggagcctgggcccaactcggtggtgccgtatccccagcaccccgtatgggcaagtgattgtgcttgttcctcgattgaatggatcttcacagcagtcctgggatgtggaggcttttatctaccccatttcacacagggaaaactgaggctcaaagacatggagccctcccccccaccacttgtgggtgcttcgaggatgtccgtggaccatgcgcgctccctggaattctgtgggaggaatgctgcggtctcgggcagctccacaaacggaggtgtgttctgagtgggggtgggtgcgtctgtccatgctgcctgggggacaatgtgtgtgtgtgtgcgcgcgcgcgcgtgcggggaggggagggggagggaagggggggaaggggtgataaaagagcccttgggaggggagctgctaatttcgctgggggaaggggaccctctcattccccttctgctcttcccacccctccccctcccccaccaagatgcccaggcgaggggaccttcctgggagggggacgacacggagtagggggcagcgtggagttgggagacagggagtaggggcgacactcttccaaagaccccctcacagccccgcagatattgcaaattccccatttcctgcactcccccctcgcttcccctcccctctcctccccttccccccttccacaggatcctccggggctggaccctgcaacccctcccgggtcccgggagctcgcgccctgctcccgcccactggacgcccgcagccaatggccgcgccgcttgatgaggtaatgcgccccctctgcgtccccattggccagcctggagcccattcccttgtcccctgcaagcagtggagacccagcggggcgcgggcggggtgttcccagggtggcacctgggtacctgcgttccccccatgcccctctctgtgaaaccccccacttgcccctccccctcttcgggcccagtagggtccaggggctggacttgggggactcctgcccccagcgacgcccagttcctcccataggagcaaaaaggacaaaagactcccccatgcctccagtagtcaaagacccccgagctgcccatcccagacactcgcgcaggtatggagcgcctactgtatgccagccccgagactcattggggatgcagcggtggcgacatcagccccgggtccctgtccccacggggctcccaggataatggggaagagaggcaggccaccagccacgtcctccccctcctagtcggtgctgcggatgaagggtgaggagggtaggcagaggcaggaggggacagccccctcttttttttttttttgagacggagtctcgctctgtcccccaggctggagtgcagtggagcaatctcagctcaccacaacctccgcctcccaggttcacaccattctcctgcctcagcctcccgagtagctgggactacaggcacctgcc[187 bp omitted]ctgtggcctccaggagactttgggggccatatctcctcatccactgctgtattcattcagcaaatatgtccttagtaccccctccccagtccactgcctcttgttttgtatatttcttcttttttctcccccttctgtccccataaccactggaattggcttttttttttttttttttgacagggtctgtcacccaggctggggtgcagttgtgtgatctcagctcactgcagcctcaaccttctaggctcaggtgatcctgccacctcagcttcccaagtagctgggactacaggtgaatgccaccacagccggctaatttttaaattttttctagaaataaggtctcgctatgtttcccaggctggtctcgaactcctggcttcaaacaatcctcctgcctcggcctcccaaagttcagaatgggctttaaaacaaaaagcctgtgtgtgttcttgaaactggtaaggttgttttgtctgcctgcgtttgttttttcttttctttttttttctttttagacggagttttgctcttgttgcccaggctggagtgcaatggcacgatctcggctcaccgcaacctctgcctcccgggttcaaatgattctcctgcctcagcctcccgagtatctgggattacaggcatgcaccaccacgcctggctaattttgtatttttagtagagatcgggtttctccatgttggtcaggctggtctcaaactcccaacctcaggtgatctgcacaccttggccctccaaagtgctgggattacaaatgtgagaaagaaacgtgcccagctgcgtttcttttctcttaactttcttattgaggtgaaacttggaaaccccaaatgcagaaatctcaagtgtacaagccaggtgaattttgacctaaacacacaggggtgcttgtcaccagcagccagatggagataaagatttagggcccccaactagtgggaggggagtaaggtgagtcttgtagcagaacaaggaattctcttttgtttgtttgtttttgatacagagtctcattctgttgttcaggctggagtacagtggcatgatctcagttcactgtaacctccacctcccaggcttaagcgattctcctgcctcagcctcccgaatagctgggattatgggcacccgccaccatgcccggctaatttttgtatttttagtagaaacaggatttcaccatgttggccaggctaatctcaaactcctgacctcaggtgatctgcccgccttggcctcccaaaatgctgggattacaggcgtgagccactgcacctggccggaattctctctttgttagcaagattgatgttgtgttcatcctggatttttttttttttttttttttttttgacagggtcttactctgtctcccaagctggagtgcagtggcatgagctcagctcactgcaacctccacctccagggttcaaacgattctcctgcatcagcttcccaagtagctgggattacaggcatccaccaccacgcctggctaatttttgcatttttagtagagacagtgtttcatcatgttg[138 bp omitted]gatacaggtgcaggtttgcaacataggtaagcatgtgccgtggtagtttgctgctaggtattaaacccagcatccattagctactcttcctaatgctctccctccctccctcttccaacaggccccagtgtgtgttgttcccctccctgtatccatgtattctcatcattattcagctcccactgttaagtgagaatgtgcagtgtttggttttttgttcctgtgttagtttgctgaggataatggcctccaacaccatccatgaccatgcaaaggacatgatctcattcctttttatggctgcatagtattccatggtgtgtgtatatgtaccacattttcttaatccagtctatcattgatgggccatctggatattttatttgcattaattttgatttttttaaaaaaatattgcagtcagctgtgcacagtggctcatgcctataatcctatcattttgggaggctgaggcaggaggatcgcttgagcccacaagttagaggccaacctgaacaacatagcaagaccccatctctacaaaaaatgaaataaattaaccaggcatggtggcgcatgcctgtgatctcagctattcaggaagctgaggtgggaggatcacttgagcccaggagatgcagcctgcagtgagccgtggttgtgccactgcactccagcctgggcaacagaacaagacccgatctgtttaaaaaaaaaaaaaaaaagagcgaggcgggtggatcgtttggggtcaggagttcgaaaccagcctggccaacatggtgaaactccatctctactaaaaatacaaaaattagccagtcatggtggcacacaccagtaatcccagctacttgggaagctgaggcaggagaattgcttgaacccgggaggccgaggttgcggttagccaagatcgtgccactgcactccagcctgggtgacagagcaagactccaccaaaaaataaattaatttaaaaaaataaagaagagagagagagagaaggagggaaggaagggagggagggaaaaaggaagaaagaaagaaaggaatgaaaggaaagaaagaaagagaaggaaggaagagaaaggaagaaagagaaaaagaaagaacaaaagaaaaggaaagaaagaaaagaaagagaaaaagaaaaaagaaaggaaagaaagagaaagaaagaaaggaagaaagaaaagaaagcaagcaagcagaaaaaaaagaaaaaagaaaagaaaagaaaagaaaaaggtcgggcacagtagctcaggcctgtaatcccagcactttgggaggccaaggcagtggatcacctgaggtcaggagtttgagaccagccagaacaatatgacaaaactccgtctctactaaaaatgcaaaaattagctgagcatggtggcgtgtgcctgtaatcccagctactcaggaggctgaggcaggaaaattgcttgaactcaggaggtgaaggttgcagtgagctgagatcacaccactgtactccagcctgggtgacagagcgagactccatctcaaaaagaaaagaggagagaagagaattgaagaaaagagaattgaagagacaaaaattgaagagatgagaattaagagaagagaaagagagagaagagaagaagagaagatgcagtcagatgctatttagcttgattgctgagtttttgttgctgttgttgagttttttggtcctcccttaaagtttgctcctgaggagaatccctccaccacctcaccctagccctgccctggggaagagcattctagcacccaaaagatctctcagacccctgtcatgaactgcccctctcctcccaggtgcatcttcctactctccatcaccactgtttcctttgcctatttttaaaactgatgttttgaatctggcatcttccactcagcatagttgcattggagattcatccaagctggtgcgtctctccatagtccaaccctttttattgctgagtcgtattccagcgcctgggtggaccgcagtctgtttaccgagccccgagccaccagcggataggcatttgggtttgtatcctgtgtttggctgtcacgaagaaagctgctacgaacatcctcgcacatgtctccgggtggacatatgcttctgtttctctcggggaaacacctagcagtgggtgcctgggtcgtatggtaggtgtctgtttaactttttaaggaactgccaaaccgtttcctagagtggctgtaccattttgcattccctccagcagtggaggagcgcacccgtgagtgcgtatttttggcattcttttttttttttttttttttttagacggagtcttgctctgtcgcccaggctggagtacagtggcacgatctcggctcactgcaagctccgcctcccgggttcacaccattctcctgcctcagcctcccgagtagctgagactacaggcacccgccaccacgcctggctaattttttgtattttttagtacacatggggtttcaccgtgttaaccaggatggtctcgatctcctgacttcgtgatccaccctccttggcctcccaaagtgctgggattacaggcatgagccaccgcgcccggcctttcttggcattcttgtatcttccctttggatcagctttatggaggtgtaatttaaggatacagttcgatgaactttgacaaatgtatacacctgtgtagccactacctccttccagatgtacaacatttttatcaccccaggaagctccctcaggacatgtgttgttattttatttatttgtttatttatttatttattttggggatggagtcttgctctgtcgcccaggctggaggacagtggcgcagtctcggctcactgcaacctccacctcctgggttcaagcgattctcctgcctcagccctctgagtagctgggattacaggcatgtgccaccacatccggctaactttttttgtatttttaatagagactctgtctgggagacagagtgaaactccatctg[137 bp omitted]tatgaatattcccattctttttttcttttctttttttttcttttctttttttttttgagacggagtcttactctggcgcccaggctggagtgcagtggcgccatctcggctcactgcaagctccgcctcccggattcacaccattctcctgcctcagcatcccgagtagctgggactacaggcgcccaccaccacgcc[181 bp omitted]gagttaccccgggccctgctgggagtgttaaataatctatgctgagtgcatcttatcagcatcctaaaatctggaacattctagagttctgaaatgcatctggcccaagggtttcaggtgagctcaattattatttatggggcctactgtgtgcataaattcttttttttttttttgagacagggtcactctgttgcccaggctggagtgcagtggtgcaatctcggctcactgcaatctccacctcccaggctcaagcaattctcatccctcagcctcccaagtagctggaattatagacttgtgccaccatgcccagctaacttttgtatttttttttttagtagagacggggtttcaccatgttgcccaggctgggcttgaacttctggcctcaagtgatctgccctcttcagattcccgaagtgctgagattacaggcatgagccaccacgcccagccaaattcttctaagcactggtgattagaacagacctggcccttacgggttcacagtccagcgagggaagaaggacacagggcatcatgtttacagcactgggtgtttacagcatcagggccatgatgggggagtcacaggcacggtggggcccagagggagcacctgactcaggctggggcatcagggaggcttcctggaggaagtgatgcctgagcaaagacctgaaggataagaaaggggtagcgatgaggtcaggagtttgagaccagcctgatccacaaggtgaaaccctgtctctactaaaaatacaaaaattagctgggtgtggtggcaggcacctgtaatctcagctactcaggaggctgaggagggaggatcacttgaacccgggaggcagaggttgtagtgagctgagatcatgccactgcactccagcctgggtgacaaagtgagactccatcagaaagaaggaaaaggaggggaagggagaggagagaaggggagaggaggggaggggaggggaggggctccaggcagcaagtatagcttgtgcaaaggccctgaggtgcttggagggcctgacatctgcccctcggggcttcaagttatcctggtaggtggaagaacacagatgtccacattggctttgtaacctacctggtgaggcccagagccctcctctgaccccagggctcgattgagtctttgcagccagcgggtatccagggggcaatcactgatctcgtctcccctgaggtttgctgggggcttgaccctgcagccatcaggatcccctccctcaaacttcaccctcatccttgatgctggggtgggggcaggggagacaggtcggggaggtctcactccagacagacacactccctgggccttggcagctggctcatctgaggctgaagaatttgctctttgaaaaaggcttcgctctgtggaaatctgacatctttgtggatcaattgtccctttcttctgcttcccaggcttgaaactctgttctttccctcccccagtcccctccatataatctatcagccattccaacacctctgcctgcagagtctatcccagatccacccacttctccccgctcctgtgtctccctcttggtccagccccatcactgccctcccggagcaggtgaggcacctccaccctggcccctgccacccccatccccacagtcctctctgaagcagcaagagggcgcaggtgagaacctgaatcaggtcccgtccctcctctgcctatagccctccatggctcccatcttcctctgggtcaaagcccaagtcctcactgaagcccacaaggccctgcatgacctaccctgtccctgccctgccctccccctcctccctgtctcccccttgctccctctgctgcagccacatgggcctcccggctgttcctccaatacaccaagtgcagtcctacctcagggcctttacatgggctgaaatgctcttcccccagctgcaataactt[133 bp omitted]aaaacccccgtctctactaaaaacacaaaaaattagacgggcgtggtggcatgggcctgtaatcccaactagtcaggaggctgaggcaggagaactgcttgaactcaggaggcaggggttgcagtgagctgagtttatgccactgtgctccagcctgggcaacagagcgagactccatcaaaaaaaaaaaaaaaaagaaaagaaaggaaggaaggaaggaaggaaggaaggaaggaaggaaggaaaacattatgtcaaggatgtgagtttcaagaaggcagtgactccagcaccatgcctggcacatagtaggtgctcaataaagattccttctacaatggaaggattagtcatgaaccctcaggaaaaaaaaaaatagctttgtgttcccaagtcctgcctggaagcatctggctgtggacgccaatagagatattagggggagaaaaaaaaaagggtccaaattttggttgcctcctcctgcctttaattattttgtcgacaaggctcacaattcagtaagtcaaggtggcatttgagagggacggttccctttagcgtagctgacagctaatttgtgggaagtttaattacaggcagcgttaattaactggcagagtactgggcaaggaaggcagccatctgttcctaaaaacgtcctcccctcctgggcctggctgggaggctgtgaggggtgggctagaaagaagacagggtgaagaggcggggacagaggaggagggaggagggaggaccaggtgatgaatcacggccttcttcacactgtcagggctgagatctttggcagccagcctcctccagtggcctctgggagtggcagtaacagtttctgggaatctgtctctcattggttgtatcacgaggagcagagggtgtgggacagaggaggtgaagagcccactattcttagcccatattagagagggttggcacctaccaaaggaggttgggagaaggaactgggacagagccaggggtgaaggacacactcagcagtcttggcctaagagggacagatcactctgtccctgttccacaatgagctccttcattctgaccattcttcatggggatggtacagaaatagcaacagcctctggaggtgggtgctttttttttttcttttataaagacagagtctcgctctgtcacccaggctggagtgcaatggtgcaatcatagctcactacagcctcaactccccgggctcaagcaacaatcctctggcctcagcctcccaagtagctgggactacaggtgcacgtcaccacacccggctaattgttaaattattcgtagagatgagggtctctctgtgttgcccaggctggtctcaaactcccgggttcaagtgtttctcccacctcagcgtcccaaaaccaagattacgaagccgagtttgggattacaggcacgaccccctgacttacagagatgggcttttgaaattgaatcttagctttgtccctgctgtttgccctggggcaagtcacttaacctctctgggttcagtttcctcatctggaaaatgggtttgattagaacagaacctattgctatttgtctgtcttttttttttttttttttttttttttttgacacagaacttcactttgttgcccaggctggagtgcagtggcacaatctcagctcactgcaacctccgcctcccaggttcatgcaagtctcatgtctcagcctcctaagtaactgggattacaggcgcctgctgccacaccctgctgattttttgtattttagtagagacggggtttcaccatgttgcccaggctgatctcgtactcctgagctcaggcagtctgcccatctcagcctcccaaagtgctaggattacaggcgtgagccaccatgcccggcctgtcatttatctttctagactaattaagcccaagtattttcaggctactgaagagatctctgttattacgagaactgtgtatgtgtattcaaaggtgcaaagtgttcaataaggttgagaactcctgtgccttctgcaactctgggccctcgcatatgctgttccttccacctggaacacccttcccacccctgcccagtggcttcggttttacttatgagccttgacgtggaagcctcctccctgggaagccttcccgggcccgccaggctggggcaagtgcctctctggttgcccgcaggatctgcgtgtcctccatcacagccctaatcaccctgtccccgcctggtcacactccgacttccccactggactggaagccccaggcaggcagggactgggtgcccagcacaggcctgaagaagtaggtagtcagtgcttgtgtggacaaacagcgagagctatgacccatacattgcaaggtagaggccagtggaattcaaagtcagagccgtttaaaaatgggccaggccaggtgcagtggctcacacctgtaattccagcactttgggaggccgaggcaggaggaacacttgaggttaggagttcaagagcagcctggccaagatggtgaaaccctgtctctactaaatacacaaaaaattagccgggcaagatggcgggtgcctgtaatcccagctacttgggaggctgaggcaagagaatcacttgaacctgggaggtggaggttgtagtgagccgagatggcgccactgcactccagcctgggtgacagagcgagactctgtgtcaaaaaagaaaaaaaaaagatggaactgctgttcttgaacatttcaagccaagccactaggagggacccctcagagctctgatatcctcacacagtcagggcagtcctggggtcggggagtcctcagaaataagttcaaatcctggctctaccactgctctgctgtgcaaccttggcaagtcgctttccctctctgggctcggttttctcagctgtcattcggatgtgcctcgtttctggcccctccacatctcagccgagggctctgcctccagaactggcccactttcactcgtccacgcccacccatcggctcctgcctggatcaagaccgtcacttcctccctctccacacctctccacccgtcactctccgcatcaaacgaagcctttaaaagcattaatcagctccctgtggcaaaaggcttgaactgccacttcaccaaagaagacacacagatggcaaaaaaaaaaaaaaaaaagcacgtgcaaagatgctcaatgccattagtcattggagaaatgcaaatccaaaccacagtgagatatcacttcacacttgctaaaatggctaaaattctttcagctgacaataccaagagcgggtgaggatggcgagcatccgaagctctcctacgctgcccatgggaaggcaaaacggtgcaaccccttaactccttatgaagttagacatacatgcaccaaaccccccacagcaatcccactccagggaactcccccaagagagatggaaacacacgtccgtgcaaaaacccgtacctggcagtttctaacagctctattcctaatctccccaaactggaagcgatccagcaggtgtgtttgcataaacacaccgggtcacctccacgcagcggagtgctattcggcagtcataaggaaacagcacccgagacacgcaacaatgtgggtgatattcaaatgcattctgcagagcgaaagacgccagacacaaaaggccgcccgctgtatgctcccatttataatgatgttctggaaattgctctgggaacccccgggtgtgtcttctcctccaggaaaaggctaggggcagagactagggtgtgtgtgtgtttgttggggggggcggggggaggtggaggtgggagttggttgggacggagtcttgctctgttgcccaggcttgagtgcagtggcgtgatctcggctcactgcaacctccgtctcctgggttcaagcgattctcctgcctcagcctcccgagtagctgggattacaggcacctgccaccacgcccagctaatttttgtgtttttagtagagtggggtttcaccatattggccaggctggtcttgaactcctgacctcaggtgatccacctgccttgacctcccagagtgctgggagtacaggcatgagccaccgcgcccagcctgttttttgtttgttgagacagggtcttgctctgttgcccaggctggagtgcaatggtgtgatcgtggctcactgcagcctcaaccttctgggctcaagcagtcctcctgcctcagcctctcaagtagctatgaccacaggtgcacaccaccatgcctggtttgtttttgtttttgtttttgttttgttttttgtttttatttttgttttgtttttgtagagacgggtctcaccatgttgcccaagctggtttcaaactcctggactcaagcgatcctcccacctcagcctctcaaagtgctggggttacaggcgtgagccaccatgcctggccaagacaggttttgtccactgaagcattcctggtagaggacaaagggacataaggaaacattttagggagatgggactgttctgtatcttgatagtggtggggttacgtgattgtgcatttgtcaaaattcatagacctgtagactaaacattaatgaccacttctcctctgctcccagacgcagtctcctctggctacactgcccattttgacgtttcctgcctgaggacctctgcatttgctgttccctctgcctggaatgctgttccccatatctcccttcatgtctttctgtggttgaatctttccaatctattttttttttttttttttttgagttggagttttgctctgtcgccaggctggagtgcaatggagcaatctcagcttactgcaacctccacccacctcccaggttcaagcgattcttctgcctcagccccccaagtagctgagaccacaggtacatgccaccatgtccggctaattttttgtatgtttagtagagacggggttt[142 bp omitted]tcctcagggaggccctccctgatcactcctaactaaattcaccacccccctccataacccgctattccatcaccatgttgcactaaaaaacaaaaacaaaaacaaaaaaactgcaattcattagataataaattccctgagagtggggtctctcttggtcacagcagtgtccccagcacagcactagcggatagcaggtgctcattaaatatggatcaagaggcaggagtttgagatcagcctgcgcaacatgaaaaaacccactacaaaaattagccaggcatagtggcgcatgcctgtaatcccagctgattaggaggctgaggtaggagaatcgcttgaacccgggaggtggagattgtggtgagccgagactgcaccactgcactccagcctgggcaacagagcaagactatgtctcaaaaaaaaaaaaaaaaagagagagagagagagacagtcgagtgaaagagcaaagcacacagggctctgtgaacccgggtttgaattcaggcttggcccctggtatgctgtgtggcttcaggtaaatcgaatcacctctctgttcctcatctggaaggtggaattaacatgcctctcttgcaggagtgtggggaggtttaatccagcaggcaccagccctgagctccctgagtcctcctgtgggcaaaagccccagtcctcatttgcagatgccctggaacctacctagcctcgcccagccagggtgcagcctcagggaatgcttgctgaatggcagaatagacaaatcagtgacaacacaagcaaatgccttttcctggtaattaagttcacttggtaattaagtcctcaaacatcccagccctccctcatcttagccctaaggacttattttgcaattctccaaaatgctcagaatcaactgcaccgcccgtcccttcacacggactgtgaaccaggcatcgcctggtgtgctctttcccccaacttccacttttcttgccaagttcctacttgtccttcaagtccacttgaaatctcccctcctccaggaagcctgccctgaaccccattatctgggctccctcagccctggctgtctgggtccatctcttacccaagcctggggctccttgagggctgggcaggggctggagaactcttggagtccgctgtgtttcccagcgcagatgtgggcacccagtggggaaccctaaatactcagtgagtgcattcatggggccagggttcaaatcccagctcagtcactttgcggctttgtagtcctagtgagtctggtcccctgtcacagactcagtttcccccctctagaagatggggtgtccacaggaacctggccctggatgcagggggtcagcggagtttcccgcaaggcacggtcacaggctgcaggctgcattgctcagtggcagtgctggtggctcctgccatccccgagtgcccccctcctctggggctcagtttccccatttggccacactcccccttagacaaacacagacggggcgccacctggctgggcaggagggggcctcggcagcttctcacgaagaacagcagccaaggtgggggctggcggggctggcacaggccggcctcgttaagctgccagtccttggcaccactctgctttcgtggaggcgtctggagaagggcccaggcctggctgttgggggactgaggaagctgggatgaagctgagaccctttttcagagggggcaggccctgagtgatggcaaggagttctatgttcacttattaagcatctactggatgccagaccaggctactcaggcagggcgtttgcccgtgctgttctagctgccaggatcgcgtttcctgttcatagcactatccactgctcattctgatctcagtctagaagacaccacctccaggaagccttctagattctctagaataagccaggtgcggccggg[175 bp omitted]gaggcaggagaatgccgtgaacctgggaggcagagcttgcagggagctgagatggtgccactgcactccagcctgggcgacacagcgagactccgtctcaaaaaaaaaaaaaaaaaaaagaataagccaggtgcctccctttgggttggcacggtgcctgagttttccccatcacagtttgatcactcaatattttatttttagaggtggggtcttgctctgtggcccgctgctggagtgccacagcatgatcagagctcactgcagcctcaaactcccaggctcaagcgatgttcccgcttcagcctcccgagtagctgtgatcacccaatattataactgggctgtgggcaggtcacttaggccatcaacaaatgcaaacagagcacttcgtacgtggtaggcactatgcttagcaccgtccatgctcagcgaaccccgcagtgcaggtgctgatgctgcctcctctttacagaaggggcaactgaggctcacagtggctgaatggtggagtgaagccacatggcctggagtctggtgcacagaagggcccgggaaaagctcatttccatccccagggacagtgagctcactcaccactgaaggaggcctaagctggaggtgtggggattcattcattcaacaaatatgtattgggcagccattgaaggccaggttactcaagtgtgtccgagtgacaggtggtgttggacgcctccaacatctgttgtcttgtcctccatagtaatagaagccctggttttcagctgcacagttggccattcagaataaatactacatttcccagcaagctttctgccaggcatggccacgtgactaattctggccaatgcagtgtgagcagaagtggtgcctgggatttccaagaagtgtccttaaagggacagggtgagctcttcctcactctttcctcctcattgcctgggaggcagatgtgatggctggagctcacgcacctgccttgtcccacgaggaggaggccatttactgaggatatggtggatggaaggagtctgggctgcagacaccccagcatctccatgccatcccaggaatgactactcacattccacattcagaagcaaatcagccctgtacgcctacaccgctgtggttgggtcttgcttaccacagccaacccgagcctgaccgctacatttgtccctctctgcttctgtttttccactcttgcctcctctcatgcctgctggactgaaaaacctgcctctgcttggtagcactgggctgcaagggccatccacagtggccaaggcagtggcctctagatagtgtggcctccgtctgtggcagtagacagagcaggggcaggagtgccaccaggggccgggcatggtggctcacaaatgtaaccccagcactttgggaggctgagactggcagatcacttgaggtcaggagttcgagacaagcctgggcaacctagcaaaacccccgtttctattaagatacaaaaattagccgggcatggcagcatgtgctcgtggcctcaactgatctgcccgcctcgggctcctaaagtgctaggattacggacatgagccaccatgcccggccttttctccctttcttagaaggaaaacctctgcaaagatcttatttccaaataaggtccattcacaggggttggtcagaaccaggggttaggggttcaacatctctatttggggcccacccactacatggtacaagagatttgtgtgggaggtgatctcagaagctgtgggaggggagagaagtgggtggggaagggaaggagacagtagcgggctcattgacaagacagtactgggttcgttgacttatggagctcattcgactggggacctctaggagatatggtagaacatacttcgatttgtcccataagagggacgagggagtgggggcatttatctaccacctcccatctgtcactggctgagggctgctctgagaggtattaggccaacacagaaaatctaaagactaagtagtcagcctggcaaagtgaagttgaggagcaagaattctgttccaggcagagggaacagcatttgcaaaattctagaggtgaacaaagcaagatgcctctgggacattgcaaatcatccaggcttcagagattggcaggcgcccaaccacaggggtgcatgtaggccacagagaagagtgtgggctttatctggagggcaatggggagccatgggagagtttagagcatgggaaagactatgttacaggtctggaagctgaggcccagagaggctaaggaatttagctgatgtcatacagcttatgaatggcagagacagaaatccgacttgagtgggctgcagacagattgagggtgtgaaatttgggggatggggactggggaggaggtgaggctgatgcccagggctgaagctcaggcagggggcacagttggagacccagctggagaggcaatgctatagggagagagaatgaagctggtgcaagcctggaggccaacctggcggtgcggacttgggaccactgacccccaccagccccaccctgaccctggcacttgactctccctccaaatcaagtccaggagggctctgaggatatatggactcagacctgagtccggataaaagagccagctacggagagaaagggctttccaggcaggaggcccagcccatgcaaaggccctggggcaggatcctgcctggtgtgttggaggaacagcaaggagatctgtgtggctggagcagagtgagggatggtgacagggggtcaggaatttgggttttaagcactgatctcattgtaggggggcgtggcttgaacaagtctgggtcactcttggagtctcagacaagggtaacattgaaccttctacagtgtgttgctaggaacctccagaagctgatgctggtagcgtcttcgcacagtgagggctgaatctgcactgctgggggccggcagcccttttgaagcatccctgggcctccttgggtccaaagataccctgagccttcaagaagttatctcaaagcttgcccgggtaccggcaaatcacagacctaggaatgatccattggccacaggcccaggcagctggcagctcctgggacagaatgtagcagggcgatgtcacagaagctgggggcatctagaaccctggtgactcctggtctccatgtcatctgccagaaaggccacctgcgccagcacctcctgagaccggccttcaaagacacgacgcatgccgctctgccgtccggagcacttaatgcctagagccagcagggtcccagtggccgcgtcactgcctctgagccacgcggtcattccaactcaactgccctcgcgtcctggccacaggccccctgggagaccccggagatgcccaaaggcctcatgcctgccgcctccagtgggacctagcagcacacagacagcgaagcgggtgaccatggggtggccacggccgggccgagccctcgtggcagtcaaagccttgctggtcttgtcgctgctccaggtgcccgcgcaggcagtggtacgggccgtgctggaagacaactcgagctcggtggactttgcggatctgccggcgctgttcggcgtccccctggcccccgagggcatacggggctacctgatggaggtcaagccagccaacgcgtgccatcccatcgaggccccgcgactgggcaaccgctctctgggcgccatcgtgctgatccgccgctacgactgcaccttcgacctcaaggtgctgaacgcccagcgcgccggcttcgaggcggccatcgtgcacaacgtccactccgacgacctcgtgagcatgacccacgtctacgaggacttgaggggccagatcgccatcccctcagtgttcgtgagcgaggccgcctcgcaggacctgcgggtcatcctgggctgcaacaagtcggcccacgcgctgctcctgcccgacgacccaccgtgccacgacctgggctgtcaccccgtgctgaccgtgtcctgggtgctgggctgtaccctggccctggtcgtatcagccttctttgtcctgaaccacctgtggctctgggcccaggcctgctgcagccacagacggccggtgaagacgtctacctgccagaaggcccaggtccgcaccttcacgtggcacaacgacctgtgtgccatctgcctggatgagtatgaggagggcgaccaactcaagatcctgccctgctcccacacctaccactgcaaatgcattgacccctggttctcccaagccccccggcgctcctgccccgtgtgcaaacagtcggtggccgccacagaagacagctttgactccaccacctacagcttcagggacgaggacccctccctaccgggccaccggccccccatctgggccattcaagtccagctacgctcccggaggctggagctgctgggccgcgccagtccccactgccactgcagcaccacgtccctggaggcagagtataccactgtctcctcagcccctcctgaggcccctggtcagtaaagatctagggcagggaggggggtgcaatgaggaatgtttctggtctgaaaagaataaagtgggtttgaaagcggattctcagcctcgctgctgttgggccacccgcctctgactggggttgggggacacccatccccatcaagcctaaggccaatccccgtttctgcgggcgggagagcgaggggtggtgagggctggggggcctttttggggcggctgtgaccgtggtgccggagtggctttgagacgggtcgtctgtgctttggttccagtcccgggcacacgggtcactcatcctggatggccttattcttcattcacattttttcttttaaaataaacgttttattttggaactggtttagatttccagaaaagttgcaaaggtgccatagagttctccaaccccttttactccgtttcctcttatgtctcatgggatcccaggtgtgatgggatgggaggccgaggtgggaggttcgctcaaggttagaggtttgagaccagcctgggcaacataacaagaccccacctctacaaaaaaattttcttaggccgggcgtagtggcttacgcctgtaatcccagcactttaagaagccaaggcgggcggatcatgaggtcaggagatcaagaccatcctggccaacatggtgaaaccctgtctctactaaaaactacaaaaatgagctgggcgtggtggtgcgtgcctgtagtcccagctgctcgctactcaggaggctgaggcaggagaattgcttgaacccaggaggtggaggttgcagtgagttgagatcacgccactgcactccagcctagcgacagtgaggctccgtctcaaaaaagaaaaaaaaattcattagccaagtgtggtgatacatgcctgtagttccagctacttgggaggctgaggtgggaggattgctggagcctgggaggtgagctatgatcacaccactgcacttcagctcgggcaacagagtgagaccctgtctcaaaaaaaaaaaaaaaaaatgcaaggaggcaagggagttttctgggcagtgagggggctgtttgaccatgctccgacgagaaatagctactaggtgaggtcataggagcaaaagggtcaaggtcgcctctgagacattccctggaacagtgtgaatgtgagagtcacgtgcaagattccgactgaagcccaagcaacctccagagagcgcccactctgtgccagacgcggttccaggcacacagacacagcagtgaacaaaacaggggaaagtccctgctctccagggactgctattccagggtgggggatagatacaaagtatataattaaataaatgagcagggagatgtcagcacgagataaatcctggggctaaaacacaagggggtcatgagatggagagagcttggcggatgatcagggagatcacggaggaaacatgagaaccgagactcagggccgggcacagtggctcacgcctgcactcccagcacttcgggagtctgaggttagcaaatcgcttgagtctaggagttcgagaccagcctgggcaacatagtgaaactccatctctccaaaaaaatacaaaaattagcggggtatggtggtgcacacctatagtcccagctactcaggaggctgagacgggaggatcacctgagcccaggagctcaaagctgcagtgagctatgattgcaccactgcactccaacctgggtgacagagtgagaccctgtctcaacaaaaacaaaaacaaaaaacacaaactgagactgaaaggggaggaaggaggcgttagtgcaggaaggatattccaggcagagtgtacagcccatgcaaaggccctgcgacaggactgcacctgacatgttggaggaacagccagaagcccatatggcagcagcagagtgagtcagaggggagagggaggagcgtgggaaggggatagggcaggtcgtgcaggccctcgtagagcttagtaaggaacagattttgggccaggtgtggtggctcacgcctgtaatcccagtactttgggaggccgaggcgggcagatcacgaggtcaggagatcaggattatcctggccaacacggtgaaaccccatctgtattaaaaatacaaaaaattagccaggcgtggtagcgtgcacctgtaaccccgggtactcgggaggctgaggcaggagaatcgcttgaacctgggaggcggaggttgcagtgagctgagatcgcgccactgcactccagcctggggacacagagacactccgtctcaaaaaaaaaaaaagaaaaaagaa[141 bp omitted]cgacaccccatttctactaaaaatacaaacattagctaggcatggtagtgcgtgcctgtaatcccagctactcgggaggctgaggcagagaatcacttgaatctgggaagcagaagttacagtgagccaagatcacgccactgcactccagcctgggtgaccgagggagactctgtctcagtaaaacaaaggaaagaaaagaaaagaaaagaagagacacagagacaaagacacagggaagacagccacgtgacaacgaaggtagagattggaatgatgcagccacaaacttgttacctcctctttttatgaagacaccagtcatactggattagggtccatcttaatgacctcatcttaacttgattacgtctgcaaagatcctatttccaaatacggtcgcattcccagatatcagaggtcaggacttcagcatattttttgagaggatgcaattcaacccataacataggggtgagagggaaggaggcccagctttggggaattgccagacctggatttgaagctggctttgctgtttctggctttctttgagatgatgggcatggccatttctctctctgatctctactttatggatatggaaaatggacatcctaacagcacgtacctcatattgttcctgggagattttaaagaggtacttcatgcaaatacaattttttttttttttttgagactgagcctcgtcgcccagggtggagtgcagtggcatgatcttggctcactgcaacctccacctcccaagttcaagtgattcttctgcctcagcctcccaagtagctgggattacaggcatgtaccaccacacctggttaatttttgtgtttttggtagagacgtggtttcaccatattcgctaggctggtctcgaactcctgacctcaagtgatcctcccgccatggcctccaaaaatgcgaggattacaggtgtgagccactgcgcccagccggcaaatacaaaatttaatgtgcttcctccacctctttgattgccacagtgctgggtctcacttccacacctttgcacaggcagttttctctgcccagagtgccctccacatgcctcgctcagcctagctcaacattaccattccttcagtcccttgcacacatctacaaaaaggatcccaaatacgagagtcaagagtcctgggtttaggccaggcacggtggctcacacctgtaatcctagcactttgggaagccacggcaggaagatttcttgagcccaggagttcaagaccagcctgggcaacatagcgagatcccatctctacaaataaatttttaaaaattagccaggcctggtagtgcctgactgtagtcccagccacttgggaggctgaggcaggaggatcacctgagcccaggaggtcaaggctgcagtgagctatgatcacaccactgcattccagcttagcttgggtgacacagacaatctcaaaaaaaaaaaaaaaaagtcctaggttcaaattcccagccctgctacttactgtgaagccccctgagaatgccactaccccctcagagtcttgacttgctcctctgtaaatgaggataacagtgctagctacctatggcagacatgtatttggggccagcagcacggtgcagctgtgggaaactacctgtcttccattctgagtacacgtggctgcaaggagtggggagaagagaccttcttccagattctgggtagtcacatgacccaggcctagccaatgaaaggattgcaccctctaagccacagtgattggttcaggatgggacatgtgatccaagctgggccaatgagagccagccctgggatttgtccaagaaggatcaaaaagaagactcttctggagaggcactggtgcacgtctgtaatcccagcactttgggaggcctaggtggctggaacacttgacatcaggagtccaagaccagcctgggcaacatggtgaaaccctcatctctactaaaaatacaaaaattagctgggcgtggtggtggacgcctgtaatcccagctacctaggaggctaaggcaagataatcacttcaacccaggaggtggaggttgcagtgagccgaggtgcccatcacttacttctcctctgtattagttcattctcacgctgctatgaagaaatacctgagactgggtaatttataaaggaaagaggtttaattgactcacagttctgcatggctggggaggcctcaggaaacttataatcatggcagaaggggaagcaaacgcgtccttcttcacatggtggcaggagagagaagtgaagaggaggaagctctttataaaaccagctgatctcatgagaactcactcactctcacaagaacagcatgggggaaatgcccccatgatctaatcacatcctatggggtcccttgcccaacatgtggggattacaattcagattacaattcaagatgagatttgggtggggacacagagccatccagaccatatcaccccctcagcatctcagcttcctcagctgtcaaatgacagtgactcaaggcagagaccacatacgttttctgcacatagttgcccatgagccctcctatcaccatttgagcttgggggatgtgatgttccccgtttctcccaggaggaagctggcatacagacaggggaccacccctgcccaagtgccacagctaaggagaagctgcaccaggcctcagcatccgcccttccccacgcctggctccccaaacctcctgcctcactggctgtgtcccagcttggcccctgccaggccagatgtccggctgcaaattaaacagatttgctgtccgaaatcagactgcttcttttgtcttttctcccgtcctgctccaaggtctcaggttttatgccaggatagctaaactctcagagacagaaaacattgctgggatggaagatctgtctgtacagggtgatatgtcttgggttggcacatgctacactgccttgtccagcagcccacattctgcctggggctcctggtgactaggggttggaagaagagagagaaacccatgggtggaacacattggtggggatcagacattattgcactgtaccttttcatggacaggcagagaaatgtagcccagagagaggcgggcccagcacatgctcatccagtgtgttggggacaaagacaagattcaaattcatgtcacctgactccggtgggctggcacttccctaagtcttgtctgggtagctcatgagtcaacaaataattggcgcggccaggccaattgagtgagacccagcatggtgtctcactcctgtaatcccagaactttgggaggctgaggcaagaggatcacttgagcccagaagtttgagaccagcctgggcaacatatctagaccgtgtctctagcaaaaaaaaacgaacaaaaaaattaaccaggtgtggtggtgcatgcctgtagtaccagctacttgggaggctgagatgggagggtcacttgagcccaggagttcgaggctgcagtgagctgagattgtgccactgcactccagcctgagcaacagagtgagaacctatctcaaaaacaacaccaccaaaaaaaaccccaaaaaacaaaaataaaaaccagacacacagccttggggacctgtcctcgcacaccactccactcccactactcccacactctgcgctgggtttagattttcttcactggggtgttttgctgatcagcttttaattttactatagtgaaatcggccaattcgttttcttttaggattcttgctccctgtgtccaaagaaacctttgcctaccctgaagccacaaaaatattgtttttattctcctctaaaatttttgtaattcaagctttcatgtttcatctatgatgcatcttgaattgatttttgtgtatggtgtgaggtaagggttagggttctttatttccccacacaggtagccagttgttccagaggcttttgttgaaaatacttgccttttgtcactggatcatctaaaagcaaatgaccatgtatgtatatgttgggggggggggatgtctttttctgtgttctctattctgtttcatggatctatttgtcaatccttatgccaatacccttgccttgtttactgtagctttattagacatagacttcctttcttcttttccttctccttctttcttcttcttcttcttcttcttcttcttcttcttcttcctcttcctcttcttcttcttcctcttcttcttcctcttctttagacagagtcttgctctgttgcccaggccagagtgcaatgacacaatcacagctcactgcaaccttgacctcctgggctcaagtgatcctcccacctcagcctcccaagtagctgggactacaagcatgtgccagaacgactggataatttatttattttttgtagtgatgggatcttgctatgttgcccagactggtctcaaactcctggcctcaagcaatcctcctgcctcgacctcccaaattgctgggattgcaggcatgagccactgtgcccagcctggacatagatttcaaagagcaagatccatgtggtatcagctccatatacagacttccagcaggaccaagggagctgttgggagatggaagcactggtgttttctccagggattcatccatggatgagcattcctctaaagtagcatctcatagcatctttgctcctagaacacacttcattcttgagctgacacccaatcatacttcctgagcacctgggatttgttgattggtgtcatctcatttgtttattcatcacaaatttgctaagcaccttctacgtgccagagcctgtgttgggcactgggacacaaaactgaccacaacaaacccagcccccaccttcgcaaattctgtccagtggaggaggcaaatattgaactatgtttgaacaactgaacaagaatgtttcaaacagtggtgagtcccaggagagaaataaggagataagataaagcgtgtgagaggcaggatcaatcaaagaatgctagaattactgggtgaaagttgagggagaaagaggatatttgcccagtctcaaagtaactctctcatgatatttattcactggaaaagaataaagataactttctggggggaaatctagctggtaccaccttagccaagggatcaaaattaatgcccccagcaacaagacacattgacagtgtgtgcctcctgatctgctgttctgaggggaccacagcaccatctcagtgggatctggacagaaatgcagaatccccatctaatcatgattagacactagaaaagcctgaattgagtgaccttctgtaaaacacctggccagtgctcttcaaaagagtcaaggttgactgggcatggtggctcatgcctgtaatcctagcacttttggaggccaaggcaggaggattgcttgagaccaagagttggagaccagcctggacaacatagtgagacaccatctctacaaagaaaaaattaaaattagctgggtgtggcc[141 bp omitted]gtggtggcatgcacctgtagccccagctgctctggaggctgaggcaggagaatggcttgaacctgggaggcggaggttgcagtgagctgagattgcgccactgcactccaggccgggtgacagagcgaaactctgtctcaacaaaaaattaattaattaattaattaattaaataaaattagctgggtgtggtggtccatgcttgtagacccagctactcgggaggctgaggccggaggatcacttgaagccagaagttgcagcctgcagtcagctatgattacaccactgcactccagcctgggcaacagagcgagaccctatctctaacaaaaagagagagagaaggagtcagtggccggcagacagggtggttgggaacgtcctgtgtgagtaggaggaatttaaactgaagcgtggagagtaaggagacaggatgggagaagatcggagttgcagggggtgggaacaacatgagcacatgtcccatggcaggaggggttggtgtgtcagaagaggagaagagagtgtggctggtgtggacggcaggagtgaagaggtaatggggctgatgatgaagggccttgtcagccacgatgaacagtttgcattttcttgcctgtgcaattcagagcctgttctatttgagttcccccaaagcagccccccagacaaggatttcaggacaagtggtgtatgtgggagataaacccaggaagccctaggaagcgtgtgggaaggtccaagagggaagagaagcagcaaacaggggtgcttttgtgagccaggggcaggtggagttcagtcccactggggaccttggggagcctgtgttgactgtgaaactcagaattgccccacctggccaggtgcggtggctcacacctgtaattccagcactttgggaggccagggaaggcagatcccttgaggtcaggagttcgaaaccagcctggccaacatggtaaaactccatctctactaaaaatacaaaaattagccaggagtggtggcgggtgcctgtaatcccagctactcaggaggctgaagcaggagaatcgcttgaacctgggaggcagaggttgcagtgggccgagatagcaccattgcactctagcctgggcgacagagtgagactccgtctcaaaaaaacaaaaacaaaaacaaaaaacaaacaaacaaaaagaattgccccaccccaaggacaagggatttatgcaaaagccagtgcaccatcggttgggggttgctgggaggagtagtgtgaattctgtgatacttccagcccaccacgggcaatgtcagagcaggcttggacagacagaccgagttggaatcccagcctgcacttccaggaaacagggaggaccccagggatctgagcaggaggccaatggcgtcatgtccagagtccacagagcttcactgaccaatacgggagctgccggctacatgtgaatatttaaagtcattcaaatgaaataaaatttaaaatgcaggtcctcactcacactggccacattgcaagcaccctatagctgcatgggggtggctgtgttggctggcgtgggtctagaacattccacgcatcccagaaagtactaataaacagccctgtgctagacaatgttgatcaagagagtgatacaatcctattttgactctaagaagatctctctcttaagagaaaacagctagttgggagtgcaggtggaagttagaaacccggaaaagtgtctggggcaggtgtccaggctggaggtgataaaagctcagaccagtgcagtagtagtaggggtggggcaaagccatttggaagaagcatcaacagaaagtcctgcccattcagacgtgaggggtaaggggagaggagaaagagaaggggaaacctggactctgatgtgagtgacaggtggagatggtcacccaagaggagaagcagatttggggcagatactgagctgcttctgggccttgctgggtctgaggggtcagagggaactccaggaggacgtgcagttggcagctggactctgatggcggagacctgggcagacatgagaatctgggcccacggggtattttggccacaggcccagctggcaaccgctgggctgtgatgtaacttgtcaggcggaagccgagccccgtccccaggctcagaggcacagcttgcctaaatgctaacaagttttgcctccaaatggtggtggggtgtgcgtgtgtgtatgtgtgtgtttaattctggaatgaatttaattctaattccgccgactttggggatgggaaacagctgtcttaatgagttaacagtgggtttaaaatagcaagcatctgttcgctgtctgagccagcacccgctgaggccactcccaggctgcagggctcagttttgggggggccctggttgcagctctggagatagtagggaacagagggctggcagtcctgagaccccagtgccaggcgagtgtcctgccccctcctgggatttctggtgcctcgtttgtgaaaaccgggcctgttgaaccaccgtgcttgagccagaacctgcgcagggggctatgagcaccatgagtgggccaggctgctgctgcgggggtggcaggtggtaagcccgtccccaccctcctcagatgcttcctggctgagtggccagaaatgcctgtgcctcagttttcccatctgtgaatggagatggtgttaagaagtttagagacattaagacatgtaaagtgtgtgcttatgaccgtgccaggcagacagtcaacactgtgggaatatgtaaagagtgtctaaaaagcaaatacaggctgggtgcggtggctcacgcctgtaatcctagcactttgggaactgagacgggaggattgcctgagcccgggaattcaaggccagcctgggcaacacagtaagaccctgtctctaaaaaaaattaaaaatttagccaattgtggcagcacacacctgtagtcccagctacttgggaggctgagctgggaggacatcttgagcccgggagtttgaggctgcagtgagccgtgatcatgccactgcactccagcccaggtgacagagcaagaccctgtttcaaaacaaacaaacaaacaaacaaacaaacaagactgggcacagtgacgcatgcctgtaatcccaacactttgggaggccgaggcaggaggatcacttgagctcaggagttcaagaacagcctgggcaacatagcaagatcccatctctacaaaaaaatttaaaattagctgggcaggccgggcacggtggctcatgcctgtaatcccagcactttgggaggccaagacgggtgggtcacctgaggttaggagttcaacaccagcctgaccaacatggcaaaaccccatctctactaaaaatacaaaaagtagccaggcgtggtggcacatgcctgtagtcccagctactcaggaggctgagtcaggagaatcgtttgaaccccagaggcagaggttgcagtgagccaagatggcaccactgtactccagcctgggaacagagcaagacagtgtctcaaaaaaaaaaaaaacaaaaaaaactagctgggcatggtggcacacgcctgtggtcccagctacttgaaccacacaaggctgaggtgggaggattgcttgagcccaggagctcaaggctgcagtgagctatgattgtgccactgcacttcagcctgggcaaccaagtgagaccctttctcaaaaaaaaaaaaaaaaaaaacaggccgggcgcggttgctcactcctgtaatctcagcactttgggaggcc[134 bp omitted]gaggcaggagaacggcttgaacccgggaggcagaggttgcagtgagccgagatagcaccactgcactccagcccgggcaacacagcgagactccgtctcaaaaaaaaaaaaaaaacaaaaaaaaaccagaaagtaaacgcagcatccgtcgcttaatgatggggatactctctgaggaatgggtgatcaggtgattttgtcctgtgtgaacatcacagaatgtgcttacacacttctagatggtagagccttctgcacacctacgccatacggtatgcttgagagcctagtgctctcaagctataaacctgcagagcatgagactgcattgaacacagcaggcaactgtaacacaatggtaagtactgtgtctctaaacatatctaagggccgcgcatggtggctcacatctataattccagcactttgggaggcctaggtgggcggatcacctgagattgggagttcgagaccagcctagccaacacagtgaaactgtctctactaaaaatacgaaaattagtcgggtgtggtggtgcacgcctgtaatcccagctatttgagaggctgaggcaggagaatcgcttgaatccgggaggcggagtttgtagagagctgagatggtgccactgcactccagcctgggtgacagcacgagactctgtctcaaaaaaaaaaaaaagagagagagagagagaagctgaaggtgtccaggtgcccacaaatgcatccagcctagtgctcacctgcctgagggggtctggggaaggggggagcctttgccccagcagaaggaaggagttggtgtccacggctgcaccttcgcaagggggctggctgtgtagggggaaagttgtcggtgatagggggtctgagtccacgactcagctcttggagaatcctggagacccccatatcattagagaaagtggccagcaccctctcctttctcaaaagattaacagacactcagctgttcatttgatagtgtggggatttacagcccagtcttgggatcagagagacccgggtccagttcagcctctgaaacttcttgactgtgtgaccttgggtgagtgtgtttacctctctggacttggacagtcctgggttcaagtccctgctcatcagccacatgatctgtcctcagtttccccttctgaaaagtgaaatgcccatagtcactgagctgtctaaagcataaaacaagatagcccaccccagccctccagatgtgctgtcattgtgtttattatttatttattcattgattgagatggagtctcgctctgttgcccaggctggagtgcagtgacgccatcttggctcactgcaacctccacctcccaggttcaagcgattctcctgcctcagcctccagagtagctgggattacaggtgcccgccactgcacccagagaatttttgtatttttagtagaggcggggtttcaccatgttggccaggctgatctcaaactcctgacctcaggtgatccgtccacctccgcctcccggagtgctgggattacaggcctggaccatcgcgcccggcctatcattgtgtttaaagtccacagctcctaattgctgaaaaagtcaaacacacgcttcccctatgacccagccacgcctctcctaggtatttatttacccaagagaaacgatgcctacatccacaccaagactcgtacagacttgttcagagcagctttatgcataccagccccaaactggaaataatccaaatgtttacccacaggtaaacagataagcaaacagtggtccattcagaccacagtattctgttcggccataaaaaggaaaagggcactgattgacccaacagcagggctgagcctggaaatcagtaatgctgaggaataaaagtcagacgtaaaaagagtacgcactggtgacatccagaaaatgcagactcatttataggaaccctaagcagaccagtgggtgcctggaaagggttggggacaggaaggaggggaaggagggggaggggttacaaagggagtaatgtattcattttgttggtgatggacatgttcactgtttccattatgcagatggctttatggatatatgtgtctagataatccactccccgcaaatgactcctggctgcctggccacaaccgtcctgtgcctcattttcctcatctgtaagcagagatgttgttaaaaagtttagaggctgccaggcgcggtggctcacacctgtaatctcagcactttgggaggctgaggcgggcagatcaccagaggtcagaagttcgagaccaacctggccaacatggcgaaatcccatctctacgaaaagtacaaaaattaggcatggtggcgggcacctgtaatcccagctactcgggaggctgaggctggagaatcgcttgaacctgggaggcagaggttgcagtgagccgagatcctgccactgcactccagcctgggtgacaagagggagactccatctcaaaaaaaaaaaaaatgtttagaggccacgcctgtaatcccagcactttgggaggctgaggtgagaggatcacttgaggtcagaagttccacaccagcctgggcaacgcaacaaaaaacagtatcgctacaaaaaacacaaaaatttaattagccaggcatggtgatgtgcacctgtgggcctagctactcaagaggctgaggtacgaggatcacttaagcccaggaagtctaggctgcagcgagccgtgatcgcgccacagcactccagcctggacaacagactaacaccctgtctcaaaaaaaaaatttttttaaaacctcactttacctcagtaaaactataaacacacaatacaagctcttcctccaaaaatacctagcctggcacccatcatgcatggggtacccactggattggggacttcatgaccttaatggagacagggaccagtgtggggtggaggagaacttaggagaagctcccacttcctttttttttttttttttttaaattgagacagagtctcactctgtcacccaggctggagtgcagcggcgcgatcttggctcatggcaacatccgcctcccaagttcaagcaattctcccgcctcagcctcccaagtagctgggattacaggcacacactgccacgcccggcttttttttttttttttttttgagacggagtcttgctctgtcacccatgctggagtgcagtggtgtgatcttggctcactgcaacctctgcctcccaggttcaagcgattctcttgccgcagcctcccgagtagctaggattataggcgcacaccaccacgcccggccaattttttgtatttttagtagggacagggtttcaccatgttggccaaggtggtcttgaactcctgacctcaagtgatctgcctgccttgggctcccaaagtgctgggattacaggtgtgagccactgcacccaggcagctcccacttctcgaatcaccctcccccacatctataccccactaccccgatccctgggaaaaggaatctgggccccgtcagccttcgcctctcccaggccacaacaagtaatttctgaacgttgttcactctgccaacaagagacaagattaattatggccataacacaccaggcgccgcctaaatctttcatagatccatgcgcgcactcacacacgcctgcacacgctcacacacagcctgcggctggctctctcattcctctggattttgcatttctttgaaagatgctgcaggtggacacgaggggagatgcctcctctccctccttgtctctttcacctgcctgagcggatcttggggaggaagggagctttcgccccagcgagaggaaggagtcagtgtccacgggggcatctttgcaagggggttggctgtgtagggaggaagttatcagtgatagggggtctgggaccatgacccggctcttggggtaaacctggagatccctgtgtcattagggaaagtggccagcaccctctcctttcccaaaagatgaacagacactcatctattcatttgacagtgtgagggtttacagaccagtcttgggaccagagagaccaggtcccattcagcctctgaaacttcttgactatgttgtgtgatcttgggtgaatgtttttaacctctctgggcctcaattttctcatctgcaaaatgggggtaataatattaatagtatcctatgtcgtggggttgctgtgaggcctaaagcagatctaaattccttagaaagttctcagtgtagggccaggtatacagtaggagttcaatcaattagctatcatgagagttttttgtttgtttttgacacgtagttttgctcttgtcgcccaggctggagtgcagtggcatgatctcggctcactgcaacctccacctcctgggttcaagcaattctcctgcctcagcctcctgagtggctgggattacaggcatgtgccaccacgcccagctaatttttgtatttttagtagagacagggttttgcca[138 bp omitted]tcacctcctgtgctcagatcttatttcttattttttcatccttgcattttatatatggaggctcaaagccatgaaagggcttagtgagggactcatacaccaggatgtggccaaaggaattccgagatgcctcagtgatcttgagacctcttctgtttgccagtgaggaaactgaggcccagagaggggcagagttgactctcaggcctctacttcccggctcagtcctgggtctcttgaactccagatattcccagtcacatccctgcctgtccttggtactgcagccgcagaagctgcctgcctgcaatttaccaaatgtgacagcatcttggccccagtagtgcaacccaagccagtggcatctgcggggctgtcacctcccatgccaggtctgagtgatggttggagggggtgagagacaaacacttactgtgtgcccgagcccagctggctaggtgcttctgcagacttggcggatgactgaagacactcagtgaccccaaggacaagtggcacatgaccccattaggcagatgtggaaactgaggctccaggatggatggaaacactgcaggattccttcccgctggtgggccctggaccgggggttgcagacttagctgtgagcaaaacagacctggcccctaccctcctgggctctcatggcatggggaagatgagccctgagcattaacattataaatagttattagtggctcacccctgcaatcccagcactttgggaggccgaggtgggcagatcacctgaggtcaggagctcaagaccagcctggccaacatggcgaaacctcgtctctactaaaaatacaaaaattagccgggcgtggtggtgcgcgcctgtaatcccagctactcgggagggtgaggcagaagaatcacttgaactcgggaggcagatgttgcagtgagccgatattgtgccactgcactccagcctgggtgacagagcaagattctgtctcaaaaaaaaaagctatgcagtctgctgggtaatgaatcctatgaaaattaaagcaagaaggggcatggggtgccagagattccatggaagaaagtgaaagttagaaactaaggtgggcaatgtgtcagggaggcctcactgagcaggtgacatctcagcagatacttgaaagaggcagggagggagccgtgtggtgactggagaagagtgttggaaacagagggcacagcccgtgcaaagaccctatggcagaacctcgcctggcatgttggaggaacagcgaggaggcccatgtggctggagcagagtgaggaaggggagacacggagggagggaggggaggggagggaggggacgggccaagtcatgcagggctttgcgggctgcagagaggacttgggctttgactctgagggaggcgggagccatggagggctgtaggcagaggagggacggaacctgattcaggtgtccacagagtgaaggtggaggagggtgggccactttagcccaggtagtctgggacggctactctaaagaggtgaccttggagttccagttgagtggggagcagccttgagatgctctagggcaagaaagggcattccaggctggattgcttctaaaaagcttggcctatttgaagaatgccagacagacagtgtggctggagtgagctgggaggaaagcagaggagaaggacctgattgggggttctggaccccccagaacactgaagacaacagtgacagctttcattattatttctattattattattttgtagaaatggggtcttgctatgttgcccaggctggtctcgatctcctggcctcaagcgatcctcccacctcagcctcctgagtagctgggacctcaggcacatgccatcacacccagctaatttttttttaattttttgcagagatcggatctcgctatgttgcccaggctggtcttgaactcctggcctcaagcaattctcctgcctcagcctcctgaagtgcagggattacaggtgtgaaccactgtgccctgccagagccctagagttttaatcttgatctaaggaaatagcaagtcatggcagggctttcagcaggggagggacaaaatcagatggacagggtggtgcagcagacagaacaatgccgcccaaagatgtccacatcctaattcttagaacagaatccttagactgtattatgttacatgatgtagtgggttgaaaagcacactcctaggccgggcatggtggctcagcctgtaatcccagcactttaggaagctgaggtgggggcggatcatgaggtcaggagttcgagaccagcctggccaacgtggcgaaaccccgtctctactagaaatacaaaaattagctgggcatggtggcatgtgcctgtaatcccagctactcaggaggctgaggcaggagaattggttgaacctcggaggcggaggttgcagtgagctgagatcatgccactgcactccagcctgggcaatggagcaagattccgtcaaaaaaagaaggaaggaaggaaggaaaggagggagggagggagggagggagaagcacgctcgtctgccccatcaaattcacgtccatccaaaatctcagaatggcattgtatttagagatagcatctttgccagcctggacaacacggtgaaaccctgtctctccaaaaactacaaaaattagccgggcatggtggctcgcaccttgtagtcccagcttactcgggaggctaaggtgggaggtttgcttgagcctgggagtttgaggctgcagtgagctatgattgcaccactgcactccagcctgggcgacagagcaagaccctgtctccaaaaagaaaaagaaaaaaaaagaaatagggtctttgcagatgaaattatcctggatgtagagtggcccaaaatctaac[135 bp omitted]cccatctctactaaaaatacaaaaaattacccggatgttatggcgggcgcctgtagtcccagctactcgggaggctgaggcag[153 bp omitted]gaggctgaggggagaggatcatttgaggccaggagttcaagaccagcctggacaacatagcaagacctccatctctaaaaatacattttttaaaagaataaaatgaagcaaaataaaccccctgccacaatcctgttccctggggtgaccccccttgacgttctggtgtggatgcttctggaatgttctccggtgtcattctgctctgtcctccggcccccacccacgtgtccaggatgtgagtcctcgtccgctaccacaccagacctcacccttcatcacggctgcatagccttccttttcagggatgatagaggtcacctgccccccagtgacgggtttctggtcatttctggttatttgtctgtcaacgctgaagtgaaggctgctggacgcatctctctgttgctctaaaaccctaacttacagaggcccagtctggtttatttttaatcttttctttttttctttttctttttctttttctttcttttctttctttttttttttttttttttgagacggagtctcattctgtagcccaggctggagtgcaatggcgtgatttcagctcaatgcaacctccacctcccaggttcaagccattctcctgcctcagctcccccaagtagctgggactacaagcgcacgccaccacacctggctaattttttttttttttttttttttttagtagagacatgtttttgccatgttgaccaggctggtttcaaactcctgacctcaagagatccacccaccttggcctcccaaagtgctggcattacaggcatgagccactgcacctggcctgctttctttggaatggtctgctttattttgaatttcaagcgattctgctgacacgaggcgcagacagagttggttctgagtcccctggcccttcgccagtgccctgagccaagggagggtacagggctctcttcctccacctccaggccaccactctgcccccctccaacccattcccccaacacagacagtgggatctgtttattcataaagtagatcacgtccctctcctactcaaatccctcccagggatccctagtaccacttgaataaaacccgaagtcctccccacagcccgtaaagccctgcacaccttgccctgtcccttccctactttgccctgtcccctccctgccctctcctcctcctcaccccctcctctccccctcctcactctgctgcagccacacgagccccctcgctgttcctccaacacgccagggtctgtcctgccccagggccttggcactgatggtgcctcctgctcacccccttgtccaggcaaacgcctcattttgcaaatcacagctccaatatcatttactcattccatacttacggaggagagaaagaaagagagagaggctggggtgtctgagagaggatgtcggaggggaaaagctaggcagggggctggaggggaggggcggggtgtggacaggcttgcaggggggcgtctcggaggctgatgaggcagctgggacagaggtgggggcggcggcccccggatgtgtgcagccccctgccgcccacccccccagcagcgcgctggctgctgcccgtcaacactcgccagagatgcgggaaatattttctctccggctgacacttttggcaaaatacaattcctccagcttttttccgtgcaaaaaacatgtccatcaaacccgtccctgcggcgcctgtggaagagggaggccgctggattgggtccgggaattgcgggaatggctccggggagagatggcagcctccccgccccgctctctctcgctctctctgcagtcagaaggcgacataaaaacagtaagaaaaatagttaaaagcccaccgcgtgttcagtcagcgctggactttctcctatctatgcctgctccatgtgcctgcacaaccctactgctattagccccgggtttccgataagaatgctgagcccagagaggggaagacgcttccccaaggtcacacagcacagttgggatttgaattcagatcctacatgacctccccaggggtgcctcgaagagcctctactgaggagggagaggaaaggaaaagcaacggacaccagagggatcagcagatgtaagagtttcaagcaggcttcatgcaatagctcctgaagccctcagttaaatcctctgtagccagcagccctcagttaaatcaagatgtgactgtggctttcccaactgcctgtatcatcctttcacatgctagtccccacaaacccctaagccagggacaactgtggcaaccacagcaactggctcagaagaaaagaaataagaataaagtttggaagctggcgacacccagatgtcccctcctttcttacccagagtaggaaaagaggaggccttcagtaacaacggtcttagacatgagagagaacatccaccaccatggagattcaaatccaaactgcacccctcacctcctggtacactcagcccaaccatctcaactctgggagccttgaggggttgcaatgtagataccagacatataaaagctgcagtgggccgtgcttaagtggtcgagaatgtcaaatgtgagcctaacagcccggggttcgaatcccagctctgctgctttctcgctgtgcaaccttcagcaagttgcttgacctctctgtgtcactgtttccctgttggtaaaagggacataaaaattcctgcctcccaattttaaatatgttgatgttccaaaaacacatgggacggagcctagcctacaacaggtgcttatacatgtgggatataatattattattattattatttttgagacagtcttgctctgtcacccaggctggagggcagtggcacaatctcaacttactgcaacttctgcctcccaggttcaagcgattctcctgcctcagcctccccagtagctgggattacaggcacctgccaccacgcctggctaacattttgtatttttagtagagacgtggtttc[144 bp omitted]acagggagagccgggacgatgtcctccctccccgcccacccaacccagggaagggcagcagggagatggctctggtcccagagccccagccaccggcggctccctgggcgagggattgacttttctagaatgttttgcccctcctcccagtttccatcaggagccagcgcggccgcataaatcccgctttacggctgttattgacgggggagcagagagagcagccccaggaaggcccaattaattttcccacctggcatctgtgcgccagacgaatttctgaactgctgcagggaggggcagagcgagctggggaaaggccaggctgaggacaaggtcgtgggcaggccgggatatcctaggctcttagcttcagagcactgttgagggagtcccaggctctcttgtctgaagggtagaagtggagggggctgtcaattctgagtagggcttgaagctttcagttaggatgcagatgagggtttcactgaggagacactgaagcaaagacacaaaggaggctagggaggctgccacatggcttttggaaggaacagcttgccagcagagggcacagcctgtgcaaaggccctgaggcaggacctcacctggggtgttggaggaacaacgaggaggcccatgtggctggagcagagtgagtgagggggagacaaggaggaggagagggcagggaggggctggggcaggtcgtgcagggcctggtaggcctcggggaggacttgggctttgaccctgagggaggtgggagccattgagggctgtgggcagaggagagacgagatctgacttaggtgctcacgggcgccctctggctgctgttcagagaacagttgtgggattcacagggaaaacaaaacccagttactaaattctcccaggtccaggtattggctgggatctgtaaaccagagaccc[132 bp omitted]ctccatcactatttccaaaactttctcatcttcccaaattgaaactccatctccatgaaacactcactccccacccccctccccagcccctggcactccccatcctacgttctgtctctgtgaatctgatgactctagggatctcctaggagtggagtcacacaagatttgttcttttgtgtctggcttctctcactgagtgtgatgtcctcaaggttcatcaatgtcatcgcctgtatcagaatttccttcctttttaaggctgagtaatattccattttatgcatagatcacattttgctcatccattcgtctgatgaaacacttgtgttgtttttggcttttgcctatcgtgaatcatgctgctatgaatgtgagtgtacaagtatctctttgagactctgctttctatcaaattttgtttgattttaattaatttaatgtaaacagccacccatggctagtgactgccatattggacagagtggctctgcagaatggaaagagaatagaagagaatgaatttttttctttcttcagtgtgattgaattctctgtctgggccaacgaatggcaggcatctcatgagtcaatgacagttataagtgtcccacactagaaccaattgtccagggcagacacatcccaagagccagggcgaccatggaaaagcccctgcctaggatgaggtcccatggtcctgctgctttcttctgcccaagggcaggtggtctggatccaacaggcttggggacaagagccaccatgtccttagccacccctttctggctgttgctgcacagccctgcttacaagagacccaaggcagccacacctcaccccatggccatgggcctcatgaaggtggtgcccagggagatcgggtgggagatctgggactccttggattgcacctgtgctgtagaagagccttgaaggaaatgtttaaatggaggtgtatccattagctattgctgtgtaacaaagtacccacaaacctagcagcttcaagcaacacatttattatctcacagttcccatggattgggaatctgagcatggcttagctggggcccctgcattagggtttcttacaaggttacagttttggtgtcaaccaggactatggtctcatcagaggctcgactggggaaggatccatttctaagccttctcgggttgctagcaggattcatttccttgtggctgcaggattgaggtgcctggcttcttgccattggctgaattctgctctcagcttcaagaggctgcccacagttccttgcaatgtggtccccaccctgggctgttcacaatgtgaccatgtgccagtaagagagaaaaagagtagtgagattgctagccagatagagtcttatgtaaggtaatataatcatggaagcaacattctgtcacctgtgctatatactgttgatgagaaacaagtcacaggtcatgcccacactcaagagtagggaattatgcacaggatgtgaacaccagaaggcaggaatcatgggagccactttaggatctgtctgccacaggagataaagagagcaagagttttcaatggctctgggccccaaggggtttctgggagacagggaaggaagaaaaggaggggggaaggaggagctgagagtaagagagattgggaattgggaggaagggaaaaagaaagacattaaattccatctatatctgtggtgccccacttttgcccagccttgtacccagaaaagtaccagccctggatttttctatgtctagcacagatactcccagcctagtctgacatttgctgtgataagggaggttggaaaaggttcctgatccaatgtggggttgggaaaggtatcctggaggaggcactttctgtgctgatccccaagtttgagacagagccaatgggtgagaagggggagtgggttcttgctggagagaccagcaagaacaaaggcccagaagcatgaagcagagatgtatgttcacaccaggagagcagagtgataatacaagagggtggaggaatgggtcattactttgcctcttagggaggtgatgttgtacccattgtacagatgggaagactgaggctcagagaggtgaaaccactttctccaggccacagggctaagaagcggagcagcctcattcgtaaaatggatgtttgaggtcctcattagatctcacatcctggctctgaggcctcctttgtgactcgggatcaaaaacaagaataataataatagcagcagtatttgttgatcactttctatgtgctaagtgctcttgtaaatgctgtacttcagaagtcagccagggacaaatacagtccaacacctgtttttaatttttttttttgagacggagtctcactgtgtcacccaggctggagtgcagtggtgcaatctcagctcgctgccagctccgcctcctgggttcacaccactctcctgactc[176 bp omitted]ccggacaacttttttaatagttgaaaaaataaaataatattgtggtgctgaacacagtggctcatgcctgtagtcatgtcagtgtttagggaggtgaggcgggaggattgcttgaggccaggagttagacaccagcctgagcaacatagcaaaaccccatttccaccaaaaatttaaaaattacctgggtgtagtggtgtgagcctgtggtcccagctactcaggaagctgaggggagaggatcccttgagcccaggagttcgaggctacagtgagctatgatggcaccactgcgctccagcctgggtgacagagcgagaccccgtctctaaaaaaaagaaaatagtaaacataaaataaaataaaataaaaacttgtcttttgggacacatgaaaatatgaaattccaatgtcagcatcaacaaataaagttttactggcatgcaaccatgctcatttgctcagctatcatctatgactgcttttacacgactggcagagttgactttctggccaaaacttttgactttctggccccttacagaaaaagcttgccagcccctgctgtcatgtgttcactctttgcaacagccccatgagttagatgctgtgtcttccttcatttatacagatggggaaactgaggcatacaagctgaagtggctcagctaaggttatagtggataagtgatcaagcggggatttgaacacaggtctgttggactccccataaggtgctctcactgctgtgtcatgccttcttgcccagcccttggtgcttaaggctgggagtgcctgagtctagctctttctctccctagcctaggatccctccagagggctgggctctgcactgagccttagcagaatcccagcatccttggacccggggaggtgcgccagtcagcaaagtgcccaaagcaagctccagaatccaccttgccccctcctccagggcccatccgggaaggcagccagttaagcgcaaatcaattaaacaaactccatgctgcctgccgccctcatattctgacctcagccaagaggctcgcattccagcctggcggacttgggtccaagcaaatgcacttgtgggaggatctgagaaggggctgcaggatcaggaatccatacaaagaactccagcctggccccctgggagcctgtgatacttagtttgtataatctgatcccccttggggaacatggtggggaggtactgtgtgagcaaacgcggggaggggggaacctgtggaaacaagagcctgttctgcagaagatgagctgctcagtgtgacggagagtgcaagggaacagtgagaaagaagcctataatttgctcattgtatgtgtcaatcaagcgatagaggttgctgtttcttcgttgcatgctatctgagagatttgacacctgaaaaggaagtatcaaaatgcaggctctccctgctggactcaaacctacagccgtcttgtaagggcctgaagacagagcagagacactaagaaaagggggcttctggatccagccattcctgaagtccatatacccctggacttttcactttacaacctgacatttatgtatatggtgtctgcatggtaattaatagtggtcttgtcaaatatttcttgatctttaccttctgaaacatagaagactagattattcttcagcaaatttcattcaacctcttcccaaagtttacgggagaaatgcccttccctgacccactgaggccatcccagctacgtgacttgctttggtcaaggcaatgtgagggaatgtgacagtgtgccaattctgcacttaggtcttcagagtcactgcatgtttctacatgacctctcctgctccaacctttagccctgggtcaaaaatgccttgaaaagccactaagccaaggaagataaaaaaacacatggacccggcctgacccaattcacagggtagaactgagcccagctgatctgcagatgtgagaaggagaaataaatgctggtcaggcacagtggctcacacttgcagtcctagcactttgaggggccaaggtgagaggactgcttgaggccaggagtttgagaccaacctgggaaacacagtgagaccttgtctctacaagaagataaaaaattagccaagtgtggtggcacatggctgtagtcccaggtacttggaaggccaaggcaggaggatcatttgagcctgggagatgaggctgcagtgagctatgatggcaccactgcactccagcctgggcaatgtagcaagaccctgtctctacacacacacacacacacacaaattttttttttgagacagagtctcgttctgtcgcccagtctggagtacagctgcacaatctcagctcattgcaacctccacctcccgggttcaagtgattctcctgcctcagcctcctgagtagctgggattacagacacgtactaccacgcctggctaatttttgtattttgagtagagacggggtttcacc[139 bp omitted]acctctggtcctaactacttgggaggctgaagcgggaggatcacttgaggccgggagttcgaggctgcagtgagctatgatcacaccactgcactccagcctgggggaacagagtaagaccctgtctctggaaaagaaaaaaagaagtgcttagggttgtatgtcaaagagatttggtggatgtcatagctacggctattacatgagcacagtttgggattgaacttcctggcttctgcaatgggttggattgagtgggaatgtaggatgggttctagacaacatggtgaaaccctgtctctactcaaaatacaacaattagctgctaatgaaataccctccagaaccctgttttcttctgccacagaaatcaacaagttccaggcagtgactgctccatcagccagggtcctggagggaagtgataatcttcaagtccctggcccaaaaggtcacaattgcatatacaatgtgagtgagaaataaactttggatgttcttagcctctgaggcataggggctgtttgattactgcagcaaaaccaagcctatcctaacagatacaacaggaatggaggcttttgataccacagaaaaaggtggcagacagtggcatagatcctaggcaaaaaggaagactccagaccctaactggtaacatttatcaagtccttgctgtggtccaggtgctctgcacagcgcttcttttgagagtttacatgcttacattgaatttgcacactcatgctatggggtaagagctgatttttttttgagacggaatcttactctgttgcccaggctggagtgcagtggcgcgatctcagctcactacaacctctgcctcctgggttaaagcgattttcctgcctcagcctcccgagcagctgggattacaagtgtgcaccaccacgcctggctaatttttcttatttttagtacgaacggggtttcaccat[131 bp omitted]aggaaactaggctcagggagggacataattcactcaaggtcacatagcagggaataggtatagctggaatttcctgccagacctgtctgattgcagagtctgcctttgcccacaatccaccttcctcctggccatgatacgacgttccaagggtctgcagccacatggtttatcatctccaccaacgggacttgagaccacaagagaaaccacaaacctcaagccctaaagcttctcaaactcacctgttgggatttaaatctttcaaggagacctagtagctccccagagtagcctcatagagccaccatccccatgcttccagttccttctatgatctcaccattattacatgggggaagatttctctctctcttttttttttttttaagagacaaggtcttgctctgtcacccaggctggagtagtacaacggcacgatcatagctcactgaagcctcgaactcccaatctcaagtgatcctcctgcctcagcttcctgggtcgctgggactgcagatgtgcaccaccatacct[131 bp omitted]cctcagcctcccaagtagctgggactacaggcgcccgccaccacacc[242 bp omitted]cttcagcctcccgagtagctgggatcacaggtgtgcaccaccacacccagctaatttttgtattttcacggagatgaggtttcaccgtgttggccaggcttatctcaaactcctgacctcaggtgatctgcctgcctccgcctcccaaagtgctgggattacaggcatgagccaccacgcccggcctacctggctaatgtttaaattttttgcagagatgtgttctgccgggaaaaaaaaaaaagacacacctttacgttgcccaggctggtttcaaactcctgacctgaagtcatccttccactcagcttcccaaagtgctgggattataggcacgagccgctgtgtacttgccatcgtggggggattttatatcccagacacccagaactgccccttagcttctgttttttttttttgttgttgttttttttttttagacacagtcttgccctgcacgtcaggctggagtgcagtggtgccacctcggctcactgcaacctctgcttccccggttcaagcaattctcctgcctcagcctcccaagtagctgggatcacaggtgtgcaccaccacacccagctaatttttgtattttcacagagatgaggtttcaccgtgttggccaggcttgtctcaaactcctgacctcaggtgatctgcctgcctccgcctcccaaagtgttgggattacaggcgtgagccactgcgcccagcctgaaagcatcatcttttcttttttccttccatagcatttctcaccttctaacacaccctgccacatacctacttgtcactgtattccacggg[133 bp omitted]atggagaaaccccgtctctactaaaactacaaaattagccgggcatggtggcgcatgcctgtaatcccagctactcgggaggttgagg[131 bp omitted]aacgttttcaattgctatctcatttcatcatcaccatcatcacgttgtacagatggggaaactgaggcccccaaagggacagagggtttttcaaagccaccgatcaagtctgaaatcgactcccctgtcctgaggtttgtctccgccctgcagcctccatcccccagttccaaatcagggcaccccggacattccaggactggcttcaccctgacatcgagctctggccgagctccctcgtttggtgaaaatctaatcacgccagcctgaatgctgacatcgaaatgactgccgagcccttgactcggggtaattaggagcattttgggatgccttgcttgattaaaagcagatcacccgttcagaatgaaaattcaggaggcagattgcttttgttgttgccacgatgctattttaaacccacgcagctctccagctaataaagacccgtcaatcggctgtcggggtgttcaggacgaactgtctgcagggttcccccactgctgtttaccacagcaccacagcccagagggacccctgtcaggacatcagagccagcagggtgcaggttgacctcagtgtcactcccaaacctctcagggttactccccgtgtctgcctggtccctgaaccagaaagtcagatgtcgacctggtctcttctcgccctcatcccctccccagatcctatcccacctgtccccaggaccccctcctgcccggattccagttcctggctcctccctggcctctagcctcccatccgtcctccccagaaagctccttttttttttttttttgagacagggtctcgttctgtcacccatgctggagtgcagtggcaagatcttgactcactgcagcctcgacctcctgggctcaggtgatcctcacacctcagcctccagagtagctgggaccataggtgcatgtgccaccatgcctcatttttgtacctttttgtatagacagggtttcactatgttgcccaggctggtctcgaactcctgggctcaagtgagcctcctgcctcagcctcccaaagtgctgggattacaggtgtgagccatcgcacccagccccaagaaggctccttctaaggtttgctcagcctccctgtgctttgacttcacccaatgaaccacttcttattcttccagactcagtcacctcctctgacctccaggctggcccagagaccccctcttttctctaatcacccaggtcggaaccaccctttcctgggtccgcctcctgcctggactgtgagccatgtgtggatggggtcaggtctgtggtgctcactgatggttctccagagcccagcacaggt[146 bp omitted]accccatctctactaaaaacacaaaaattagccaggcttggtggcatgcacctgtaatcccagctactcgggaggctgagacaggagaatcacttgagcccaggaggcggaggttgcactgagctgagatcgcgccactgcactccagcctgggcaacagagactccagtaaaaaaaataaataaataaaaataaaaatactgatgaatgaaggaatgaatgcatgcatgcattggggtgggaggtactaggaacaccctggatctcaaggtatcgggacctcaaatggcccatctctctgccctgaagcacccccttctgccagtctaggtcctgacctgcaccccagccagggggagggacagaggcctccctcagagactcagccttcagctcatgatttccccagcagaggaagggacaggacagccccttagcctgaccccttccccaccccaacccccaaagacaccaatatgtccacatcacatagatgcaggcattctgtccgaccccaggaacagataatccaatgccggggagaggatgggggtgggctccagggctgggctccctgtttttcaggggccagtggctgggcatggagttggacgacagagaaggccctggaggccaagggaaaggattccagcagaagatgcgggggagggctgcagtgggaagtctgtcctgtagtctaaccttgggccggggagtgatgtaacacagcggttctccttgtgggtgattctgccccccaagggacacttgaccatgtctgggggtatttgtgcttgtcacctctccgtagcgggggtgtgctgctggtatccaatgggtggaggccagcgatgctgtggcacaacctaaaacgcacaggacactccccacctcagagagtaacacagccccagatatcagccatgccatccgggcgcggtggctcacgcctgtaatcccaacactttgggtggctgaggtgggaggatggcttgagcccaggagtttgcgaccagcctaggcaacatggtgaaaccacatctctacaaaaggaaaaaagtacaaaaaattagctgggtgtggtggtgcatgcctgtggtcccagctactcgggaggctgaggcaggagaatcgcttgaacccaggaggcggaggttgcagtgagctgagatcatgccactgtactccagcctgggccacagagtgagcctccatctcaaaaagaaaaaaggccgaaggggagagcatctaatgtcagctaacacttagggacacccactctggcccaggcttttctgggggctgcttgaccaccctaacttcccgtgaggtgtgcatgaacatcattccatttccagatgtggaaaaccgaggcccacagcagcaaagccacagccccaaggtcgcacggtgtgtttgaaggtcagccacacgggggcaaggaattttgtttctggctaattcactgctgggtccttggggtcctagaatcaggcctggcacatagcaggtgctcaggaaacactgaatgaatgaatgaatgaatgaatgaatgaatgaatagcagagctgggattcagacccaagctggtggatgccagagccccccactcgcagccctgggctcggagggggggacttctgctgccctttatgtccctgcaaccccctggactgctgagccccacgggccaggcgctgtcaggatcctggaggccgcagctgatgtttaaagtccctattgtggttcctgaaaaaggagcaggtgttggcagcttggcttcgccaaggaggccctgcggccggcgcctttgtcccttgagctggtaaaatcctctgctcggccgctccattcaacccactcaattccacgttccactttcacccccgtccacattcttcgcctgcaaatcccccattctgagcggctgggcccaaaaggcgggcgtctttgttcgtcttttcttgtcctcctctgcccgttaatctaatcgcttcctctctgagatgcgggaggaaggagaagggagggaggaaaataaacaaatactgagggtaaaagaaaagattcgccgaggtttccattgaaggggatttcgcctgccactttgagatattgacaaaggctggtggggggcgaggggaggcttgcggcggggaagtcgggcactgggcgggtggacctggctcccggcgctgcattgagatattcagaaaaacaaattcatctggcctgtcttcctgacagtttgactgccagacactggtaagtccaggccaggggagacagctgtcaaccatcccgagctgaagagtttgggaaggaaggcagagaccaacggggcccattcccctctctctccccgatttgctgtgtgaccttgagggacatgcctgctgtctctgtgccttgtcactaagaagcggccctttatgtccccactttggagggatggaggattcaggggtgctcagagagtgaaaggtgtttgcacaagtttacccaatgctgccgaagcaaactcctggtttagggccccttcccaggacgagggaggaggggagagggctagaggctggtcagagggtccagatggagctcaaaagccgtcaacccaatgtcatcccacagggattcccaggtgactgagggaccctcttctgtctgagtcctcggccttttctgtatactaataatcttgtttttctttttcttttttgagatggagtctccctctgtcacccaggctgaagtgcagtggtgtgatctcggctcactgcaacctctgtctcctgggttccagcgattctcctgcctcagcctcctgagtaactgggcttacaggcacctgccaccacgcctggctaatttttgtatttttagtagagacaggtttttgccatgttggccaggctggtctcaaatgcctggcctcaagtgatttgcctgcctcggactcccaaagtgctggtgctgggattacaggcgtgagccaccacgtccggccaagacgctatttctttaaaaaaaaaaaaaaaatcagcaggtgttgtggtgtgtgcctgtggtaccagttactcaggaggctgaggtgggaggatcacttgagcctgggaggtcaagactgcagtgagccatgatcgtgctactgcactccagcctaggcaacagagtgagaccttgtctctatttaaaaaaaaaaaaaatagatgatggccaggcacagtagctcactcctgtaataccagcactttgggaggccgaggagggctgatctcttgagatcaggagtttgagaccagcctggccaacatagtacaaccccgtctctactaaaactacaaaaaaattagccgggcgtggtgccacacacctgtaatcccagctactcaggaggctgaggcaggagaacagcttgaaccccagaggcagaggttgcagtgagccgagatcgcgccactgcactccagcctggacaacagggcgaga[134 bp omitted]tgaaaccccatctctactaaaaatacaaaacttagctgggcgtggtaggggggtgggcgtctataatcccagctacttgggaggctgaggcaggagaatcacttgaacccaggaggcagaggttgcagtaagccgaaatcacgccattgcactccagcctgggcgacaagagcaagactcggacttaaaaaaaaaaaaaaatgcatgaaaagcccaaggtttggtgcataaagagatggcagaaatcaaagtctcagagatttcgtgcaaaacttgcccccaaaggatcctgcaatcccacccctaggcttttattttctttgatgatacacgtgcctgtgtccctgggtggggaatcttgctattgttaggaaatgaaacgccaccgcctgagcttgattgcgttcttcccacccccgctgcccaggatccactcacaatgggggacgggggacgtggggggcacggaagccccaacacgggaggtggaattaatcacagcaccatacatgggaggtgcctcaattgttgcaatctatgtaatgagagaaaaacaaaaatgactgcttccctgaggaattagagggaggcgttttccattagggttttgttgatgaaaaaggacacgattagagaaaatcctgttgttggcagggccctggtcccgggttcgagccagagaggggcactccaaggaaacggtgtctggggccgggagcagggctcacgcctataattccagcactttggggggccgagacgggcggatcacaaggttaggagtttgagaacagcctggccaacatagtgaaatgctgtctctaccaaaaatacaaaaattagccaggcgtggtggcgggcgcctgtagtcccagctactcgagaggttgaggcaggagaatctcttgaacctgggaggcagaggttgcagtgagctgagatcgcgccactgcactccagcctgggtgacagagcaagactctgcctcaaaaataaataaatacaaaaatacaaaaattagctgggcacggtggctcacacctgtaatcccagcactttgggaggtggaggcaggcggatcacttgaggtcaggagtttgagactagcctggccaacatggcgaaaccccatctctactgaaaatataaaaattagtagggtgtgctggcacacacctgtaatcccagctactcaggaggctgagtagaattgcttgaacatgggaggtggaggttgcagtgagccaaggttgcgccattgcactccaccctgggtgacagagcgagactctgtctccaataaataaataaataaaataaaataagcaaacccttgctgttgtggaagaagatggagccaggatcaaacaggctgaaaaatagggtgatagagctgtctgggaggtgcacagggcaagagggatcatagaaggcttcctggaggaggcggctctgcaaagacagcggaaggaagagttagaagaaggagccaagagaagagatgtgggggaatgttttaagcagaggtggcagcctggaggtgaaactgtgtgtgactccctcaggcaatcggggggtacaggagagaggctgggagaccagggaggagatctggggtgggagtgggggactagcattggggcagaactgggaggggacagatgggagggagggcctggaggtagagcaggcaggatgtggggacagacaggctgtgatggagaggggagaagctggacagaagccagtgtccaggtctccagttcagggatgggggcccagtgggaccaccgctgagatggggacctaagagaaagagccagctgaggggagaggccgaggccagggtggccactgagggtggaagtcctgaaggatgttcaggggggaaccccagggtgatggctgggctcgcaggagggacactgagctacagtcagagctctagcatccatgcagcactgccgttccctctgcccagaacacccttccccatgctccacctgactacactgtcctctccctccaggtctcaacctggaaggcacctccaccttggagcccccctgggctgtacatcccccatgacagccccactgtcactgcccggtcaccgcgagctctgtagtggtggggctgcctccatctcgtctctgctgtgtccctagcacacagtcagcaccctaggcctgtctgttaccagagcaaacacatctgtcattttcaccatcatgtacccagcacccatcacggccctttggtaactctcgccagtcatctcatctcacatggctctttgaggggccaccacacagagggaatcgccagaggccggcctttcacatgcaagtgagaaccgggctgtttccaactgcccaggtcccagaagaaataaaaaaaaggaagaaatgggccaggcgtggtggctcacacttgtaatcccagcactttgggaggccgaggcaggaggatcacctaaggtcaagagttcgagaccagcctggccaacatggtgaaaccttgtctctactaaaaatacaaaaattagccggacatggtggcgggcacctgtaatcccaactacttgggagactgaggcaggagaatagcttgaatccaggaggcagaggttgcagtgagccaagatcgtaccacagcactccagcctgggtaacagagtgagactccgcctcaaaaaaaaaaaaaacaaaaaaacccacaaaatcacgaaagtaggtgatgaagtcaggaaactcagaagtgttatttaagcttaggaaatcaggagggcttcctggaggagatgatattggaggtgagagaatcaaaagttgagatggagctggccaggtggatacctggagcaagagcactccaggcagaaggcacagcccgtgcaaaggccctggggcaggactgcgcctggggtgttggaggaacagcgaagaggcctgtgtggctggagtggagtgagcaatgggagagaaggaggagggaggtcagggcagggacaggcgtgcagggcctgtgggccttggagagaacttgggctttgacccccaagggagatggttgccatggagggtctccataaacctcttcctcctgagtctctgcgactgtagctcccaccacctcatgtggagagaacctcaaaaggagacctttgatgctctccgggaagatgagatgatcctcacccccgacgtagccctggccatggctcctccttcttgagcaagtcccagcctggtcccaggtggctcaactcactgctgcccagaaccccagcatggctgcctcatcctcagcagaatcaagtccccacatccccacacttgtcaggcttctgccccacacatgaagagctccaaccaaaaccatttaggtctgcccctcccacccctatcgttgtctccaccatctcccacctgccagggttggggtgggggctccgggagagaagccacgtgcccttggtttccccatccaaggcatggccacatccgtccctgaaggagttaagggtacaggaaccgtagtggccatcactgtatctgaaattccagcattagggctccatccctgcagaccttgtagaaatcactagtggagttgcttattcactcaacaaacaccgacccagtgcccactttcagataagtctaaaccaggtgcagccccagccctgggctgactgcagccgagtcccggacctgacctgatcctaaccatggactgaacccaaatcctggctgagcttggactgaatctcagaccctgggttgagccagggtcaaccagggtcagccccaaccgcagactgagctccagacttggactaaccctgcctgagccctgctgaccctggcctgagccctaatatcgacagagccccaaccccaggctgagccccaatcccagcccgagccctaatatcgacagagccccaaccccaggctgagccccaatcccagcccgagccctaatatcgacagagccccaaccccaggctgagccccaatcccagcccgagccctaatatcgacagagccccaaccccaggctgagccccaatcccagcccgagccctaatatcgacagagccccaaccccaggctgagccccaatcccagcccgagccctaatatcgacagagccccaaccccaggctgagccccaatcccagcccgagccctaatatcgacagagccccaaccccaggctgagacccaatcccagcccgagccctaatatcgacagagccccaaccccaggctgagacccaatcccagcccgagccctaatatcgacagagccccaaccccaggctgagccccaatcccagcctgagccctaatatcaacagagccccaaccccaggctgagccccaatcccagcctgagccctgactctcggctgagactgtagacactgcctgactctgagtgtcagattcttttaccgcccctggaggaggctgaatccctcccagctcggctacctctaaatcctaaagcccacccggtagcctcagctgcactgacccacgctggctcagccagatccagaaggtgggagggtcttgccccccttgctcccctcagagaccccaggactggaagtttcccagtggcccagcagtgagagtgagcgggttaaggccccggctacagtgggtgggcctcaaatgctctagcctgggaggccctgccaggcgctccatctcctgcccagcgggggccgcattagccgctcaaaacccattcggggaaattagagcagaggcctctgcgacaatcacgggtcattctcgtctcctgttcccaggctctcccgcagcgatgacagcccagcaatggggctggggggtggggacacagggagattgggggatcccagccggccggctcaggctgaagccttctccaagtcagccagggaaagaaaactgtaatcactgcgggctttaaagacatcacttctgtgctccagtgctttccatagcttccagctgacaaagatgtccaaatggttcaatccaacaagcaacagtgaggtcatggcagcaccaggggagaagcccattctgccagctctccatctttctgcccacagtgtgtgcattttacgaatgtcctccagcctcggcaggtcaggaggcaaagtaggtcaggtttacatttaattcagaaatgaggtggacttcaggaatggtttgatccagcattttcaagtggtcttcaagaatcaaggttcagcagtacgcggtgcctcatgcctgtaatcccagcactttgggaggccaaggcaggtagatcacctgaggtcaaaagttcaagaccagcctagccaacatggcaaaaccccatctctactaaaaatacaaaaattagctgggtgtgagggtgcttgcttgtcatcccagctactcaggaggctgaggcaggagaatcacttgaacccgggagacggaggttgcaatgagccgagatcacaccactacactccagcctgggtgacagagcaagactttgtctcaaaaaaaaaaaataaaaaaattaattaaataaataataaaaattagctgggcatggtggcaggtgtctgtaatcccagtcacttgggaggctgaggcaggagaatcactttaacccaggaggcagaggttgcagtgagcagagatcgcaccattgcactcaaggttcagcagggcttggtggctcatacctgtaatcccagcactgtgggaggccatgacaggaggattccttgagcccaggagttcaagatcagcctgggcaatagagtgagacctcgtctctataaaaacaactttgtttaatattagctgagcgtggtggcacacgcctgtagccccagctacttgggaggctgaggtgggaggattgcttgaggccgggaagtggaggttgcagtgagacaagactgcaccactgcacaccagcctgggcaacagagtgagacccagtctcaaaaataaataagtaagtaaaaataagaatcaaggttcattctatcctgagagatctactcccagcctcttccccaacattctgcaagttttccacctccaggttttcactcaaacaagagccctcacctgactggctgttccatgcccacaggtagcacagcagtgcagttcctgaaaagggggtcaggaagctggctactacccaagccaggaattctctgcccttttccaggggtaagtttccccacctagaaaatgagaggattggaatccaggattcttagaatgtctttcagctctaagtctcggtgaatcagaagcccccacagtgggtagttttcggggattagtcctctggtagccattttagtcaacaggcaatatcagtgcgcatttgctatcagctgtgctagggcctctggactgtgataacctctaatcttcacctcctgtgtgaagtaggtactgctccattttacagaataagaaactgaggctcaggcagatccagcctcctgctaaacatcacacagctgtttggtggtagagccaaaacgtagccccccatgctacagcacctctagtcctcctggccaggatttctgggtccaaatcttcaattctggcaatgagagggaaggtggaaggaggcttttttctcccatgaatgcatctccaggtttgtcatgaaggcagtggactcagtttacttcctggaactcccccttcccctgcagggtctcccacattgctgacaaatgcacctccttctttcacagatgtggaaactagggctcataaaggaaaagtgagtctcctaaagtcttactgccaggcaatgcaatggtgtcttcatcagtctggatggactgctacagtaacaaagaacctcttggagccagcctccaagatggccccaatgagcctttgcctcctggtattcatgaccttgtggggtctcctcctccactgaatcggggctgactcgtgaggcatataaaagtgacagtgagtgacttctaaggctgagccttatataaaaggcacttcaacttcctccttggatcaacccctctaggaatgagccagcagccatgttggaagaacactcaagcagtgctatggaaaattctgcatacaaaagtgaaggacaggctgggtgtagtggctcacacctgtaatcctagcactttaggaggccaaggcagatggatcacttgaggccagaagttcaagaccagcctggccaacatggtgaaaccctgtctctactaaaaatacaaaaattagccagctgtggtggcaagcacctgtaatcccaggtactccagaggctgaggcaggagaattgcttgaacctgggaggtggaggttgcagtgagccaagatggtgacactgcactccagcctcggtaacatattgagaaagaggaaagaaagaaagagagagagagagaaagaaagaaagtaagaaaggaagagagaaagagggagagagagagagaaagagggagagagcgagagaaagggagaaagaaagagaaagaaagagagaaagagggagagggagagaaagggagagagaaagggaaggagaaagaaagagaaagaaagaaagagagaaagggagaaagagagaaaggaactcctacccacagccatgtggatgagcttggaagcagctcttccagccccagtcaagccttcagatgatacagccccagtcaacatcttgactgcaaccttgtaagaacttcggagtcagaattgcccagctaagctgctcccaaattcctgtcccataaaaccatgagaggtaataaattattattttaagccactaatttttcaggtaatttatacaaccacagtaactggaacaagctcctaaatcttagtggctctaaaacaaccaaggtttatttgtcatccacactatatgcccaatacaggttggcagggggcctctgtgtctgcctcactcaggcattgagacagatggaggaaacatcagtggtctctaagagaggggaaagaatatgaagaatgggatactggattttaaaggcttttactgaaggggattaacatgacttctactcacattttattggccaaagcaagtcatgaagccacacctcacttcaaacggcagctattggtggggtgcagtgatttacacctttaatcccagcactttgggaggctgggacaggaggatcactggaagccaggggtttgaaaccatcctgggcaacatagggagactccatctttacaaaaataatttttaaaaatagctgggcatgatgcatacctgtagttctagatacttgggaagctgaggtgggaggatcacctgaacccaggaggttgaggctgcagtgagccataatcacaccactacaccccagcctgggcaacagagtgagaccctgtctcaaattaatacaaaaaaaaaaaaaaaaaaaaagacaggtgtatgattttgctggggctaccaaaacaaaataccacgaagtgagtggctcaaacaacagaaatgtatttcctcatagttttggggtttttgttgtttgtttgagatgaagtcgtgctctgttgcccaggctggagtgcagtggcacaatctcggctcactgcaacctccacctcccgggttcaagcgattctcctgactcagcctcctgagtagctgggaatacaggtgcccaccaccacgcccagctaattttttgtttttgtatttttagtagagatggagtttcaccata[134 bp omitted]catgtaagcagggccatgctccctccaaaggctctagggaaggatccattccgtgtttttctgctggcttctgctagttccttggcttgaggtggcataactttaatcttcacatggcgtcctccatgtgaatcttagaatttctgccttcaacttctcttcccttctgcctattacatagcatttccccagctccaagcttccccatatccctccaaagtccagaaaatcaaataagttattctttatctcaggaacttccaaatttcaccttttccctcctcttgtctgttatttgccatgtctaatagagcaaggttgcaatgtcacctttcaccagaagaggctgctcacacacacacaccgtctatcttccagctaaacaccatccctgccttggtttgtagtagatgaagcttgaaattgcttatgatcactaggaagtcagggacacctcagcatagaaactcccacagtcatgggcttaacaaggctgggcccataacagttgttggttgtaaacctgggaggcaggtggtattgaccccattttataaatgggaagtctgagaagcccagcgttgcagacccacagtcttttggcttccatatgtgacctggccctatattctttactcatcttttatcacctacctgatatctaatccctcaaatcctgtcctgtctgccttcaaaacctatccagaatctggccactcctctctcttcctctgccttcaccctggtctgacatctcatcgtcacttgcctggaaccacacagtcccctcttccctggtgcccagctcccgacttcaccccccacagtctatcctcctctcagcagccaccaggggcacctgtgagcacctgagtcagatcctgtccctcctctgcccatagccctccaagaagcattcccagaggagataatacatggtctaagaattcaattccaccaaattagctggaaaagaaaggcagagatttgctcctgcacaccagcctctccccaccttcaggactttacccacacagcctcctcctttgtccagagaacccttcccttcctcctcacctggcctactttgcccagtaaattggggcagagctgggtgggtattctgcatgccctttccaggcaaagttgttccagttcctcatgtcctgcagggtgagacattgagctcctttctctttgcttgctcatcccagaatctcagttttctcatctgataaatgaaaatcaaagagacaatctcttgggtctggctcaaagagtattctgaatgcaagttagtataaccatcattattatttatgaccagaagctccatagtaacatttgtcaagactcttttaagccaccggcctcagttccaatcccacttcctcagagaagctcccttgatatggactaaatgtttgtgtcccccccatccaaattcataaattaaaaccctaacacccctccccaactatgggatggtaattgaaggaaggctcatgatgggattagtgcccttacaagaagagacaccagagagtttgctctgtttctgccatatgagaacacagcaagaaggtggccatctgcaagtcaggaagagagccctcaccaggagctaaattggctggcgctttgctctgggacttccctgcctccagaactgtgagaaaatgatcttttgtttaagccacgcagcctgtggtacagacagtccctgatttacagtagttcaacataatttttttattttttgagggtgacaaaagcaatatacatttagtatgctactctaagtcaagtagcagtgaggtggaggctgggcatggtggctcacgcctataatcccagcactttgggaggc[134 bp omitted]gaggcaggagaattgcttgaacccaggaggtggaggttgtagtgagttgagatcgtgccattgtactcccgcctgggtgacaagagcaagactctgtctcaaaaaaaaaaaaagacaatgaagtggcttccaggtaaacccattataagctgaaaatattgtaaatctaaaacgtattttgacttatgatattttcaacttttgatgggtttattgggtaatgaccccattgtaagttaaggagcatctttgtttagtgatggcagctggagcagacttcactatcctcacagccccaccccaaccaatccccgttttatccccttcattaacttctttttttttttttttttttttttgagacacagagtctctgtcactcaggctggagtgcagtgacgcaatcttggctcactgcaacctccaccttcctggttcaggtgattctcgtgcctcagcctcccaagcatctgggactacagatgcatgccaccacgcccagctaagttttgtatttttaatagagacggggtttca[131 bp omitted]gtttacctacctgctcaactctctaccttgactagaagttaaaccacatgagggcaggtgttttgtccatcttattggtggctggatccccaatacctagaatggtgcttgatatacagtaagtgctcaatatctactggatgaataggcccaggactcgcaccagagtctctgcactgtcacagagggccttgtccccctggactttggaataaacaggacacagggttcagaagcgaagatgggggaagagatcagggttctccaaactgcctttcatgaattgccctaaggcagagtttcctatctttgccactgtgggcatttgaggctgaatcattctctgggctgcgaccatcctgggcactgcagggtgctgagcagcacccctggccttcacccactccatgccaggagcaccccccaagtcatgacaaccaaaaatgtccgcagacattgccagatgcccccagagcatgcaaaatcatccctggtcaaggccactgccctaaagaaatgacttcttggctggacacagtggctcacacttgtaataccagcactttgggaggctgacgtaggaggatcacttgaggttaggagttggagaccaccctggcctccaactctatatggcaacatagcaagaagccatctc[133 bp omitted]gaaaccccatctctactaaaaacacaaaaattagccaggcgtggtggcgggcgcctgtaatcccagctgctcaggaggctgaggcacgagaattgcttgaacctgggaagcagagattgcagtgagcgagtcgagatcacgccactgtactccagcctaggtgacagagcaagactccatctcaaaaaaataaataaataaaagaaatggcttgttgcccacctttctgcctccccgcctgccaaatacatccacagcacttgtgggaagatccgtctgagaccatggattccaggctgggctgatgccggcacgcaggaggcctcgcgcaagacggctggtcccagccagacccagaaaaattagattaactcggagaagctcgccaagacgatccgtcaggccgcctgaaggacagcgtattgatttccacgttgcgaaaaaattaaatgatatccctttttgttatttaaaacgctgcttaagcaattccctaatggaacggcccggcccgggtccaggaactccctggcccggccggcagcgtctccggatcgggtggaggacgagggaatgcggacacggccctgtcttcccctccgggtaattgatgacctcaggagaacagctccattttgcctgcatgcaacgtgcacagttctgatttattaaagacataacaattatgaaaatagctgatttataatcaactcgcccggaccctaattgatttccagggtgaaatttagaaggggaggtattgacaccttgaggacagggcgagccaccggccttggggatggactgtgatgggtggctggggtggaggggggaggacgggacagggagacagcggcctgaatctagttgggttctttgttgcttcatgagatgggctttctgcccagcgttgctggagagggtcaagccgtaatggttgccaccatttcccagtgacagaggcggtccctggctccagcagaggcaactgtgccacattgcagacaaatcaggctgggcccagtggctcatgcctggaatcccagcactttggaaggccaaggcaggaggattgcttgaggccagggttcgagaccagcctgggcaacacagcaagactccggtctctattaaaataaataaagtaataatttttttttttgagatggagtgtcgctctgtcgcccaggctgaagtgcagtggcgccatctcggctcactgcaacctccgcctcccaggttcacgccattcccccacctcagcctcccgagtagctgggactacaggggcctgccaccaagcctggctaatttttttgtatttttagtagagacggggttccaccgtgttagccaggatggtcccaatctcctgaccttgtgatccacccgcctcagcctcccaaggtgctgggattacaggcgtgagccaccgtgcccggccaagtaataatttaaaaaaaaaaaaacaaatcttccagcactctgttgggaaatctcaacattgtcctcatagcagccaggacaacctgatactgttgatacaaatgagtctgccccacaatgtccagaaccttctatctctccagagcctcatgctccggttgccagatgtggccaataaaaatacaggttgccagccaggcacggtggctcatgcctgtaatcccagcactttgggaggctgaggcaggtggatcacttgaggtcagaggtcaggagttcaagaccagccgggccaacatggtgaaaccctgcctttactaaaaatacaaaaattagccgggcatggtggtgtgtgcttgtaatcccagctgctcaggaggctgaggcaggagaattgcttaaacccaggaggtggaggttgcattgagccaagatcgcaccattgcacaccagcctgggcgacagagtgagactccgtctgaaagaaaaaaaaaaaaatacagaatgccgggttcaatctgagtttcagccaaacaacaagtgagtttttagtataagtatagcccatgcaatatttggggtatactcagactttttttttttttttcttaaaaaagtattttctgtttatttgaaattcaagttgaactgggtgtcctgtatcttacctcacaatccttctgtgacgggcaggactccagctcccaacagcccgtaagggacgagactgactcccattcacctgatgggaaaattgaggcaagaggggtcgggcacggtggctcacgcctgtaatcccagctcttagggaggctgaggcaggtggatcacaaggtcaggagatcaagaccatcctggctaacacagtgaaaacacgtctttactaaaaatacaaaaaaaaaaaaaaattagccaggcttggtggcgggcacctgtagtcccagctactcgggaggctgaggcaggaaaatggcgtgaacctgggaggtagaacttgcagtgagccaaggttgcgccactgcactccagcctgggcaacagagcgagactccatctcaaaaaaaaaaaaaaaaggaaaaagaaaaaaaaaaagaaacagaaacagggctttgtgtctctggacctcggtctccacactgcacaatgggtgtgatggtggcccctccatcacgcggtgctcaggctgaggaaatgatttgtggatacccaccagcccatgagcactcgattcttgggtctccccagtgccaacaaagagagagacagaggcaaagacagagagacaaagagagagacaagagagagggatctgggctggttccggaagggcgagccccctttgcggatggggtggcccaggagggtgggaattcagtttgcaaatcagaaggttccagacttttctgtaaggcagggagacagctaaagaggagcctgcaggccgggcgcggtggctcatgcctgtaatcccgacacattgagattgggatctgaccaaggtgggtggatcatttgaagtcaggagtttgagactaacccgaccaacatggtgaaaacccatctctactaaaaatgcaaaaaattagccaggcgtggtggtgcatgcctgtaatcccagctattcaggaggctgaagca[137 bp omitted]gagcctgtaggatgcagagacccagagcacctacccacagctgccaacgcccagtccccaagatggccctgctgagcagttttaagtattgttaaagataaaataatttttccttctctgagccatctgattgacgtggtaatgggccccgcagacagggagaaggtcaggttgcaatgtaatcagttttttctagagtgacgtataatcatgatagcagtgcacctggaaaagggggagggacctgcgacagtccccagaccctctgagctctccgttgcaggacacgacagggccacaaggacggtgggacccagggaggcttcctggaggaggcgtagctgcagctgggattggaaggacatggcatcacaaatgcaaagttgtggaggttggaactgtctctttgtgcctcttcctgatcccactagatcttactctccaggggagaatccaattcccacctttcccagcgtctagagacatccgcatcccttggctcagggccccctcctccaccttcacagccagcagtggctggtctagtccttctttggtttttttgtttgtttgtttgtttgagacagagtctcaccctgtaaggcaggaagacagctaaagaggagcctgcaggccgggcgcggtggctcatgcctgtaatcccgacactttgagattgggatccggccgaggtgggtggatcatttgaagtcaggagtttgagaccagcccgactaacatggtgaaaccccgtctctactaaaaatgcaaaaaattagccggacgtggtggtacatgtctgtaatcccagctattcaggaggctgaagcaggagaatctcttgaacctgagaggtggaggtggagcccaggctggagtgcagtggcgccatctctgctaactgcaacctctgcctcccgggttcaagtgattctcctgcctcagcctcccgagtagctgagattacaggcgcccgtcaccacacctggctaatttttgtatttttagtagagatggggtttcaccatgttggccaggctggccttgaactcctgacctcaagtgatcctcccgcctcggcctcccaaaatgctgggattacaggcgtgagctaccgcgcccggccaggcctggtccttcctgtgttgctatctgattctctctcttctgcctctgtcttccactttaaaagacccttgcgatgatttgggcccaccaggtactccagaataatatctttctctctcatcactagctgcctggcaaccttcattccacctgcaaccctaattctcctttgccattgaatcacattcatggggtctaagattaggatgtggacatctttgggggatcattattctgccaactacaacagctgacttgaaccaccaggcagacagcaccacgtcctacagcttgttctgtggcccaggctggagtgtagtggtgcgatcttggctcactgccgcctccacctcccgggttcaagcgattatcctgtctcagcctcccaagtagccgcgattacaggcgtgtgttaccatgcctggccaatttttgcatttttagtagagacagggtttcaccatgttggccaggctggtcttgaactcctgacctcaagtgatccacccgccttggcctcccaaagtgctgggattataggtgtgagccaccgcgcccggccactaattaggttttttgtttttgttttttgttttttctgtttttttgttttttgttttttgtttttgagacagagtctcactctgtcgcccaggctggagtgcagtggtgcgatgtcggctcactgcaagctccgcctcccgggttcatgccattctcctgcctcaccctcctgagtaaccggaactacaggcatgagccactgcgcctggcccggtttttttgtattttttgtagacagggtttcaccatgttgcccaggctggtcttgaactcctgagctcaagcgatcctcccaacttggcctcccaaagtgctgagattatgcactttcatgcattgggcattgattacaccctgagcgtggagtcatacacttgaccctctttgcctccccagctcctcctcacaggctccaccagggaagaaaataccactgtacctaatgcactgatcaaaacattgagactcagtgactgaacaacttgccaatgatccctcttgctccataaattccgaagttggaatttaaatgtatgcacatgtgatcgcaaagcccgtggatcttttttttgtatttgtatttgtatttttgtatttgtaactacttgtgatttgtataattactattatggttgtatggctactatccttcactgagcacctatttgttgatcagtctccagaattcacgccctagctgactcctctggaaaagcattttacaaaggagagagctcagagaggttgaagggcgtgtccaaggtcacccagtgggcggcagagctagaatttgaacccaagttcccctggctgccgtccactgccttccctgcctctgggaagaaaccagggctttgcggatgatctacagaggccactcatcgagaccctgctcgggttatttggcggtttcaggggctcagcacgctttttttttcttttcggcagaggctggtggcggtccgggaagatgagccaagtgctgagtctgcaatgcgaagtgtctctgcaaaagccaccagccacgtggccacagaggcccagggctgtgcagatgatcaatgtcgccccatccgtcgctctgccatcctctcacctccgcctcggcgtcctttatccctcccactccgggtcgctctccagcttcctggtgcaaaaagactgagcgacactgcagagcgtcctgaaaatgatggtgcagaaatcgtttaaggactgccgaggtgaggaagggcagcccaggccaccatggagacacgcaaggccgggtgccgtggctcacgcctgaaatcccagcactttgagaggccgaagtgggaggattgcttgagctcaggagttcgaggccagcccgggcagcatagccagacccatgttcctacaaaaaaactagcagggcacggtggcctgcacctgtagtcccagctacttgggaggctgaggcaggagaattgcttgagcttgggaggctaaggctgcaatgagctgtgatcgtcctactgcactccagcctaggcaacagagcgagaccctgtctcaagaaaagaaggaaggtttgggatgccaaggcaggtggattgcctgaggtcaggagttcaagaccagcctggccaacatggtgaaaccccgtatctactaaaatccaaaaattagctgggcgtggtggtgcatgcctgtagttccagctactagggaggctgaggcaggagaatggcgtgaacctgggaggtggagcttgcagtgagtcgagattgggccactgcactccagcctgggcgacagagtgagactccgtctcaaaaaaaaaaaaaaaaaaaagaaagaaaatacaaaattagcggggtatggtggcacatgcctgtaatcccagctactcgggaggctgagggaggagaatggcttgaatgtgggaggtagaggttgtagtgagccgagattgcggcattgcactccagcctgggcaacaagagtgaaactctgtctcaaaaaaaaaaaaaaaaaaatagagagagagcagatgaggacacagacacacacagagggaagacaatgtgaggacacaggaaaaatgtggccattgaaaagccaagaagagagacctcagaagagatcagccctgtcaacaccttgtctcaggtgtcttccagcctccagagttgtgagacaacacatttctattgtttaagccaaccagcctttgtacttctttttggcagccctaacaaactcatatagtgcccacgagaccacctttaccagctcttcaatagccaggactctaaaagtcacaaaaacaaagaacaaacagaaacacttgatttcaattgacttcagcaaaaagggagctattgtaaataatagtatgccttcaggcacggtttgatccaggtgctgaagccatgtcaagaccatctgctttcttctgaattaacttcattcacaggaggcttttccacgtggtgatcagatgggtcctaggaggacaaggcatttatcagctcagcaacccctgaggaaaatgtgtcttcttaccccacagcaggacttcacccacaagtccaccaaatatttaggagttctctctgattgggacaacatgggtcatggccctgagataatcactgaggccagaggtgtagcatcctctgattggccagccctgggtatctttgattggacctccctagaaagagactttaaggcaaggatttgtggggc[142 bp omitted]ctttactaaaaatacaaaaattagccggatgtggtggtgcgtgcctgtaatcccagctacttgggaggctgaggcaggagaatcacttgaacctgggaggcagaagttgtggtgagccgagatcatgccattgcactccagcaaaactccatctcaaaaaaaaaaaaaaaaaaaaaaaaaaaagcattccaggaatcactgggaggggagaggaaagtgagacaagggagggaaagagccaacacaaggggtgttaatgagcaggtgaatgtgcgggaaactggggctcggtcccactgggaacctctgggaggtacagaacctgcttggagttatcccaacagatgggtcagggagctgaagtattgatccacccactccccatctgtaaaggtggaaagctgcattagctctcctgccctctggcctggcttgcacaggaccaaatggcctccaacagccagcaggacaccatcagacaggagatgtcacaggtgttagcagtatacagccttcgcatgcaaaggtgacctcaaggccaggtgtggtggctcacgcttgtaatcccagcactttgggaggccaaggtgggctaatcacctgaggtcaggagttcaagatcagcctggccaacatggcaaaaccccatctctactaaaaatacaaaaaaattagcttggtgtggtggtgggcactgtaatccagctacttgccaggagaatcacttgaacccaggaggcagaggttgcagtgagctgagatcatgccactgcattccagcctgggtgacagagcaggactcagccttaaaaaaaaaaaaaaaaaaaaaaagtgacctcacgatcataggggtagggttgcactgggtcacagcctccctccctggttcccaggttgaagctgaccctgcctggacttcaggaaccaaaagcaagacagggaagttcctcccagaaaaatctaaggtgctgttcctgaaaaaggaagggtgcaatggtcttactagagtcacttctccttaattattcccatggataccatatgtgcccactgggtgcctcttgacattgccctcaagttgtccatgaccctgagcaccttctcagtctatagggccgatcaccctttccaacatcacacagagagaggaccagatggtacgatggatgacaccaaggctgctgttatttctgtggctgccacaaggtgttgctgttgaacaatagtcttgcacagtctgttgcctccttttccctttgcactggccccagtggaaccccaactgaggtccgcaaggttagagtcctttgatttacattcttgaatgacttcaggccccaatcaccaagctagacacaataacagggaaagtgaaggaggtagaacttccagacacatgttgcgttcaaaaccaggttttcctccgttctcctcctctgtcccccttgagactaagttcccacgtgacagcactaggcttccttttctgccttcaggtgtccctcggggccactcctgcccatcagagagaacctcagaagcaaaagaaactggattgcaattcctttgctccggtgaatcccacttcaacaccactagtcagctctgcacacgaaggagtttgaggaacggcagcctttgtccaagtactggtattcattacctattactgtgcaacagattatcacaaacatagcagcttgaaataactcatttattatctcacagtttctggaagtcacgcatccagaaacaacttagctggtcctctgttccagggttttcccaaacagctacaatcaagatgttacctggggccaccgacatctcaaggtcaccagagaaagatctgcttccaagttcaagtggccttgctcgcggctgctctttgttcttcttcctcttctctcttcttcttcctcttcctcttctcttcttctccttcttcttcttcttctccttcttcttcgacagcctcttagtttgttacccaggctggagtacagcagcatgatctcagctcactgcagcctcaacctctccagctcaagcaatcctcctgcctcagcctcccaagtagatggggactggaggcgcacaccaccatacccagctaattttttctatatacatatttttagggacagggtcttgctatgttgcccaggctgctcttgagttcctgggctcgagcagtgctcccacctcagcctcccacagtgctggggttacaggtgtgaacctctgtgtccagcctgatggttgcttcttctcactctcttgcagtcccacttctatgggaataacctcaggctggtctttcagaaatcagagggcccatggaagagagcccagttatcccagccaaccccctaacaagaaaggaagcccaaccaagatcagcagagctgcctatccaaccccaagttcactgcaaattcactgcagagacaggaatgagcccacttgagactggaagagtcagatggttttatctgtagacttacgaacacaaataaatgcttaggccaggagctgtggcttacacctggaatcccagcactttgggaggctgcagcaagaggatcacttgaggccaggagttcaggaccagcctggccaacatagtgaggtgccagctctacaaaaaaaaaaaaaaaaaattaggaaaaaattacctgggtgtggtggcgcacctgtagtcccagctacttggaagcagaggtaggaggattacttgaacctcagaggttgaggctgaagtgagccatgattgcaccactgcactccagcctgggcgacaaagtgagaccccaactccacactctctctcacacacacacacacacacacacacacacacacacacacacaaataagataaaataaaaacgcttagtgcttgaagtcattggctgcagggctacttgttacgtacgcagcagtagctgactgatccaaccagcaatagcgtcatcatcaccatcccccacaatgggcacccacttgccttcaatatgaataaaactaagaggaatcattcaactgattctctctaaataaagaagttctgcttcaaggagcttagctgtctccactgtacaaaggaaaggtggccggcagcgtctgctgattaaaaaatgttaagttccacttcaccaggcatcccaataccctcattttccatccaccctccctggaaggttgagaagccagggagtgctcttccaggcttgcagaccgggtcacagattggccaggggcattcaggaccctttggctgccatgaacaggacccctccctgccatccaagtcccagctgcttgcagctacggaggctccctagctcttctatccaacgaactcgagaccttcttatggtcaggcatggtggctcaggcctctaatcccagcactttgggagaccaaggtgggaggaatacttgagcccaggaattcaagaacagcctgggcaatatagcaagaccccatctctatacaaaatttaaaaataaaaaatgccctgggcacagtggtgcatgcccgtagtcccaggtactcaggaggctgaggcatgaggattgtctgtgctcagaaggtcgaggctgcagtgagctatgattgcaatactgcattccagcgtgggtgacagtgagaccctgtctcgaaaaagaaagaaagaaagaaagagagagagagcgagccaggtgtggtggctcacgcctgtaatcccagcactctgggaggccaaggcaggcggatcacaaggtcaggagatcgagaccatcctggctaacacggtgaaaccccatctctactaaaaatacaaaaaattagccaggtgtgctggcgggcacctgtagtcccaactacttgggaggctgaggcaggagaatggcgtgaacccggaaggcggagcttgcagcgagattgctccactgcattccagcctgggtgacagagcaagactctgtctcaaaaaaaaaaaaaaaaaggaagaaaaagaaagagagaagaaaagaaagaaagagagagagagaaagaaagaaaggaggaaggaagaaaggaaggaaggaaggaaaggttctcaagacgggcagtaaattttagtagaaaatggcaggactggcttcagaaaggctcacactctcagtgtcagtcgatcaggaacaagatggcttgtgttttgccttgaccatggcctagtgcttggcaatgtccagaattctttttttttttttttttttttaagatggaatctcactctgtcactcaggctgaagtgcagtggcacaatctcagctcaatgcaacctccacctcccagattcaagtgattctcctgcctcagcctcccaagtagctgggattacagacatgcaccaccacgcccagctaatatttgtgtggtatttttgtttgtttgttatgttgtttgtttgtttgtttttgcttttttttcagtagagacagcgtttcaccatattggccaggctgggtcctgacctcaggtgatccacccacctcgacctcccaaagtgctggaatgacaggcatgagccaccacactcagccatgtccaggaattcttgataagcagctctggctacaggcaccaacttgcacctgccaggaccttccctataagccctggacctccccaaggtccgggcactaacagggctgctgggacctgcttcagaacactcattctcactggtcaatgccacaagttgtatctgtagctaatttgcttttaagagatggggtcttgctatgttgccaaggtcggatgcgaactcctgacctcaagcaatcctcccacctcagccttccaggtgctgagattacgagcatgaaccatcatgcctggactctctaaattttttgtctgagagagtcttactctgtcatccaggctggagtgcggtagtgcaatcacagctcactgcagcctcgacttcccaggctcaagcaatcctcttacctcggtttcccaagtagctggaaccacaggtgcacaccaccacaaccagctaactagaaaaatgtttttagagacagggccttgctatgttgcccaggcttctaaatattttttatcatcactctggaaagcaagagttcttggccaaatagcttagtagttaagaatgtaagctcggctgggcgcggtg[131 bp omitted]tggcgggtgcctgtagtcccagctactcgggaggctgaggcaggagaatggcgtgaacccaggaggcagagcttgcagtgagcggagatcatgccactgcactccagcctgggtgacagagcaagactccatctcaaaaaaaaaaaaaaaaaagaatgtaagctctaggccaggtgcagtggctcacacctgtaatcccagtactttgggaggccaagacaagagaatcacttgaggccaggaggccaaggctgcagtgagccatgtttacactactgcactccagcctggacgacagagcaagaccttgtctcaaaaaaaaaaaaaagtaaataaaatatatatgtatgtttcactgtatttgtagaaattataggaagagtcacaagaaattaatagaattctctcatagtgggaaggtagaagctgagtggaaaacaagagagccaggcatagtgattcatgcatgaagtccttgggaggctgaggcaagaggatcatctttgaaaacaaaagacagcttagactgctcctgagccaggtggagctgcggcatacccctgagtgtcgccaatcaaagatagcctacatcagcccaaccccaaccagatcccagacacaggagcaataacacataactgtaagccagggagttttagtttggcttgttacgcagcagtagctaaccattacacttccaaaagataacactgtcatgaaccccattttatagatgaggaaatggaggctcacgttcattctcactggtcagtgccacatgctgtatctgtggctaatttgttgtggctttttgtttttgttccttttaacacagagtctcattctgttgcccaggctaaagtgcagtggcacagtcttgctcacttcaacctctgcctcatgggttcaagtgattctcgtgcctcagcctcccaaatagcttcaggggaagcctgaagtttcccagctaatgagtgataaagccaggattcaatctcagatgcccaaattcttaatcattctgtatcctgccccttaatcattctgtatgctgtctccctccaggctaagccattccttctgagtctctcctgcccaagtctttacctttgaaaggaatcacaggctcatagagacagaaagtaggatgggtggagggtagcagaggctggggagggggaggggagtgagtgtttcatggggaagaatttgagtctgggaagatgagaagattctggagatgaagggtagcaatggttgcacaacattgtgaatgtacctaatgccactgaattgtatactttcaaatgggttaaggccatgcacgcctataatcccaacgctttgagaggccaaggagggaggatcacttgagcccaggagcttgagatcaccctgggaaacatagcaagactttctctacaaaaaatacaaaaatcagccaggcacggtggtgcacacctgtagtcccagctactcgggaggctgaggcaggaggatcacttgaacccgggagtttgagactgcagtgagccgtgctcgcaccactgcactccagcccaggcgacagagtaagaacttgtctcagaaaccaaaaagggagttaaaatggtaaattttatgttatttctattttgcctcaatttttttttttttttgagacaaagtttcactcttgtcacccaggctggggtgtaatggcatgatctcggctcacggcaacctctgcctcctgggttcaagcaattcttctgcttcagcctccagagtagctgggattacaggcgcccgccaccacgcctggctagtttttgtagttttggtaga[134 bp omitted]gggagaggcagaaggaaggtttcagccttcctcacttggtgacctcactttgtgcttctcacacttcacctcttcacaataggcctagacgcagtgccagggaccggttttgagaaattgagacccagagagggtggagaattgtccaagactacacagcaagttgaaggcactgccagaacttagacttcatctacaaagtcaaactcggcctgaacgaataagacaaccccaggatccctctccagggagtgagcgattttgcttaagctcctggtggcagggggaaggagaaaggcaaggaagcaatttttctgttgcctgagccctgagaatttcctccctggggagaggcactcgctggtgaggacgtgtccgtgaagcctccaatcacaagattaggtgatttcattactgtctgaaaagctgccgggatggggacggtttgagcttacaaataatcacccccgatgcagggtgctgaagatatcacagatcccagaggctgctccggtggtggggcccgagttgtcagcacgtggggagaggggctctggagtcagagaaagagaagaacctgtccaaggtcgcacggcaaaaagggacaagagactcccctacagccaccagagcacttgtggttaaacctgagacaggtgccctccctcctctgcccacaacattccatggctcccaccttcctcagggtaaaagcctaagttatctcacaaagcccttggccgggcacggtggctcacacctgtaatcccagcactttgggaagccaaggcgggcggatcacaaggttaggagatcgagtccatcctggctaacacggtgaaaccccatctctactaaaaatacaaaaaaaacagccaggcgtagtggcgggtgcctgtagtcctagctactcgggaggctgaggcagaagaatggcatgaacccgggaggcggagcttgcagtgagccgagattgcactactgcactccagcctgagcgacagagtgagactctgcctcaaaaaaaaaaaaaaagccctgcatgacctgcccgctaccccctcatcgcctcagtgcactctcctcttccctctctccccatccctccctccacactgtccgtgtggcttcagccacataggtctcctcgctgttcctccaacgtgtcaggcacagtcctaccccagggcctttgcagaggctgttccctctgcctggaactctcttcccccacatccgtcacttaaaccaacgcattttcctccatcctattcccaggcttccatcttcacccccacgacctgtcctctctttggcagccagagggcgcctgtgagcccctgagtcaggtcctgtccctcttctgtccacagccctccatagctcccacttccctggacgtaaaagcccaagtcctcccagcagcccacaaaggcctgcatgatttgccccgtcccctccctgcctccccttcctccctctctcccactcttcactccgtcccagtccctgacactcaaaaaaagaaaacaacaacaaaaacaaacgaaaacaaaaatggggactttgcacacacctaggatctgaaaggaattttcagtgcatagcccatgcctggactcctccctgagtgaggagctcactgcctcccaacagctgtccttttatctatgagctgtgccggccatgagccaggtcagcctctgcaaaatctgggctgagtgtgaagtgcatgtgtggagggaaggggttaaaatgaggtcaggggcctggcacggtggctcacgcctgtaatcccaacactttgggagtctgaggcaggtggatcacctgaggtcaggagaccagcctggccaacatggtgaaaccccgtctctaccaaaaatacaaaaaatgagccgggcatggtggcgggtgcctgtaattccagctacttgggagcctgaggcaggagaattgttgaacccgggaggcggaggttgcagtgagttgagatcacgccactgcactccagcctgggcaatagagcaagattctgtctcaaaaacaaaagaggtcaggatcttagcagggaggctgctgttttgcataggttggaagtccccctgaggccacgggagcttgattaatccagaccctcccttctctgtctttgtctctctctttctgacagtctctccctctctttctcccttggtttgtgtctgtctgcttctgtctctcccctcttctctctcacctctgtgtttctgtctctgggtgtccatgctgttaaaagtcatacagatatgagacagcgttcaaccccaactgaaaattgccagccaccccagcagtggaataattgaatcggcgggcagcaggactgaatcaagtgagggtggaagggggcacattcccagctaaaagtggggccctcgttagggggatgcagtttgctgttggtagcaggaacatgagtttgcagggtggcgaggggggagtgaactcccactggcaggcctggctccccaggcttccctgctgaagacaagctgagtcctgcagagagaggctgaggcctgagtcgcatctatccgccccctcccccaacttcaacacatggagtctgcttaatgctccgagccacttgacaggccccagttgagggtttcaccaggatccacagccagccaagcccagctcatcaaagtggggctccattctccatcatccgaccattcacgtatctgccttctccatcacggatccatccttcacccatccagccaacacctacccatccatccttccttccatttcccaaacccccatacactcacccatatacccgcccacccattccccatcgtccgccttccatcccccaaccttcatatcccatccccctttcactcacctacacacccacccatatacccacccctacaatccccattcactcatctaccctttcctccaccatctacctacaggcctatccatccttacctccactcaaccacctacccaaaaaccatccatccatccacccatccatccactcaccatccattcatccactcatccatccatcaacccagccatccacctgtccatcaacacacccaaccattcactcatccatccatcatccatccattcacccatccacccaccacccacccatccatccatgcagctatccatccatccatccatccatccatccatctatccatccatccatccatgcacccattcacctatccacctacccatccatttatccattcatgcatgcatctacccatctatccatccatccattcatccatttatccatccatccatttatccatccatccatttatccatccatccatccatccatccatttatccatccatccatttatccatccatccatccatccttccatccatccatccatccatccgcccacctacccatccactcatccattcaccacccacccacctaaccatctactcatttatccacccatccatccatttatccatccatccttccatccatccatccatccatccatccacccacctacccatccattcatccattcaccacccacccacctaaccatctactcatttatccacccatccacccatccatccatccatcacacactcattcatccacccatccatctatccattcatacacacgcacacacacacacacacacacacacacacacacaccctcccatcccccacccatccacctttcatcccctatccctccatctcccatcccctattcaaccatccctccactcacctttcatccatctgcccatccatcctcccctccctcaccccacatttcccacccacccatccatccacccatacacacacacccacacacccattgattcattattcagcaaacgttaggctcttgctgagtgcccatatctacactgggtactgaagatacgggaattaaaacagccgaggcccctgctcgattggagattagcacctagttgggaagataaatgttaagcaaaccccggcacacacaacttcattgtagaaattgtggtggttccttggggagacactcaggccgctctgagatgggcaatgctgggaggggttcgggtaggttggggggcatgggagagctctgagggggaagggtgtggcaggcagagggagcagcatatgcaaaggagaggcagatggaactgcccctggggagggaacctggacaaggagtgggtttggggagaagttgctgctgccagattgggtgctgctgtgtgtgagaagcctgaggggaagataggcagcagccagccacagggggtggccagagggcaatggagaggagaagggatggccagagagatgggagggaaaccaggatgggtggggtcctaaagcctaggggaggggctgggaatgatcgacgatcacttccccttgctcagatggagaatttgacgtccagggatctgcatggacctgtctcccagtcaagattctgaccaacatctccctgggagaggcagaggctgcagtgagctcagatcacgccactgcgctccagcctgggtgacagaacgagaccgtgtctcaaaaaaaaaaaaactccctgggaggaccatggaaggagtgcccttctgtaggtggtttctttttattttattttattttattttattttttggcagttcactgcaacctccctagtagctggacccaagcccagctaattcttgtattttttgtagagatggggtctccctatgttgccctggctggtctcaaactcctggcctcgagcgatcctcccacctcagcctcccaaaatgccaggatgacaggcgtgggccactgtgcccagcccacagctggcttctgatcccagccgggtcggctctggctggggctccctggtcaggccacacatatgacgtaatagcctccctgttctgggctgtgaaatgggaacagttcacccactccatgaggcaatggggaagcaccaagggcaagatgaccacagtaggacactatggagtcctctacaccatgctagcatggcctcttggcccctgcatcattcattcattccttccttccttccttccttccttccttccttccttccttccttccttcgttgaatccgggaggcagaggttgcagtgagccgagatggcgccattgcactccaacctgggctacagagcaagactccgtattgatgaagtgcccaggcaccgttctgggtgttgggaagacagctacgaacaaaacagacccactccctctgtcctcactgatattaaagtagagtgaggctgggtgcggtggctcacatctgtaatcccagaactttggaaggctgaggggggtggatcacttgaggtcaggagtttgaaaccagcctggccaacatggtgaaaccctgtctctactaaaaacacaaagaaaaaaaattagccgggcgttgtggcaggcgcctataatcccagctacttgggaggctgaggcaggagaattgcttgaacccgggaggccgaggttgcagtgagccaagattgtgccactgtactacaccctaggcgacagggtgagactccgtctcaaaataaataaataaaataaaaataaaaatagcgacagagtgagactccgtctcaaaataaataaaataaaataaaaataaaaataaatagagtgagacagataataacacacaaatgcataatctaatttcagggagtgggaggaatcctaaagcaagaagcgaagcacagggcgccacacccttgtaatcccagctactcaggaggctgaggcaaaaggatcatttaaagcccaggagttcgagaccagcctgggcaacaaagggagacctcatctcaaagaattctaaagcaagggaaagcagaaaagaaggacaaaaatagagtaatcagggaaggcttctctgaggaggtgacatatgccctggaaggaaggcagtctggctaagaggtctgaggtaggaccaagtttagcattttaagaattgcttaagaatcaggcacggtggtcacgcctgtaatcccagcactttgggaacccaagacgggtggatcacttgagctcaggagtttgaggccagcctgggcaacatggtgaaaccctgtctctactaaaaatacaaaaattagctggccgggcatggtggcacatgcctgtaatcccagctacttggggggctgaagtgggaggatcgcttgaacctgagaggcaggaggctgcagtgagccaagatcgaaacactgcactccagcctcagtgacagactgagaccctgttgaggaagaaaaaagaagagaaggagaaggaaaagaaagaagaaagaaaaataagaagaagaaaggagaaagaaggaagaagaagaaaaagaatcagctagttttgaggcaagatgatcgcttgagcccaggagtttgagatcagcctgagcaacatggcaagactccatctctattattttttaagtaaataggattttttttaaaaaagattcagctactttcttttgagatggagtctcactctgtcgcccaggctggagtgcagtggtgtgagctcagctcaccgaaacctccgcctcccagattcaatcgattctcctgcctcagcctcccaagtagctgggattacaggcacacaccactacgcccggctaatgtttttgtatttttagtagagacagggtttcaccatgttggccaggctggtcttgaactcctgaactggagtgatccgcccacctcggcctcccaaagtgctgggattacagatgtgagccaccacatccagcctagaatcagctactctttgtggctggaactgtgggagggaggaagggagagaggggtccacactgcctggagcctaccctggcacttcccgtcccccttcctggcttacttctccgttatgattcaggctctgtgacatgctatacatttttctttttttttttttttgagacggagtctcactctgtcacccaggctagagtgcagtggcgtgatctccgcttactgcaacctctgcctcccgggttcaagcgattctcctgtctcag[135 bp omitted]gcctcccaaagtgtttggattacaggcgtgagccaccgcgtccagcctacatttttcttatttacgttgcctgctttctctcccctagactgctggctccgtaatgatgggacttctttccttcaggcctgcttgttccttgctttgccttcagaaactaaaacagtgtctgaaaatgtctaaatgaatgaatggacaaatgaacaggcatccttctcatcagaaggatggggtgggagggtaatcagcctctggccacttcaagaggcccctttaggaggtcagagctaagaggtacagggtcagggccccccttgattactgagattctaattaactctggggccgagagggccgctccgctctgaggaattatagataagtttgcaccccagtgtttgagcagtggctctgtggggggcgggcggcagctctccctcccctgccctcccacccacagccagctggccagggaggcgggcacagagagaggtcatttgcataggcaggtaattggttttgcaaataaatctggttcttgaaatttgtagattagtaataatacgtctccagatgagagagaaaggtcacggatgaataaaacaacaattaaactttcaggagattattaaactaaacagaaacctggcatggggtggccgagggaataaggagctgggctgggaaggtgggggtgatgggagtgggggcatctgctgcctccgctcccgctcccagatcctgcttgccagggtctgggcagagtagaacgccccgtgatcctcccagaatagcttttaggattcccatttctcagtctagaaaactgaggttgaagaaggaagaggaagaggccctaggtcacccagtgaggccacaccccaggcaggagctgaacccaagcccattagctttgcgctgtcctgggtggcagagaacctcatattggcaaagggatgggcgcaatggctcacacctgtaatcaaaacactgtgggagaccaaggcgggagccgtgcttgaagccagcagttcgagaccggccttggcaacatggtgagaccctgtctttacaaaataataatataggcaagggaatgagatgtaagaaa[146 bp omitted]accccgtctctactaaaaattcaaaaaaattagccgggtgtgatggcacacgcctgtaatcccagctactggggaggctgagacatgacaatctcttgaacctgggaggcagaggttgcagtgagccaacatcacaccactgcactccagcctgggtgacagagtgagactctatcacaaaacaaaacaaaacaaaacaaaaaagcaggcaaagggttcgattcccctctctgcacttcttggctgtgtgaccaggacaattccattctcccgctgtgcctcagtccttccatgcctatgaaattgaggcgaagcattttatgtgtgatgttaaatttgcaaatgttattatacttgcgtggcaattcaatgtgacacagcagctaatggaccgggcaccgtgcctggcatggtgtaggtggctgctttgggcatgctgggtccttggctgcaagcaacagaaatgtgctccaggaaacaaaagcagaaccaaaatgtataggtaactcggggtggaaggcaagggtgaagaaagacgtcagccaatagggagaaactgaggaaaggcgccaggtaacagccatctttcggccgccctctggcatgtaaccttgggtgagtcacctttccccttgagacctcagtctccatagctctaaaagagggaatagttgtgtctactttgcttattcagtttcatcattcaaaatattgactgagccccaaggccgggcgcggtggctcactcctgtaatcccagcactttgggaggcc[133 bp omitted]gaggcaggagaatggcttgaacctgggaggcggaggttgcagtaagccgagatcacagtgttgcactccagcctgggcgacagaatgagactccgtctcaaaaaaaaaattgactgagcccctaatgagttccaagcattgttccaggcactgaagatgcagcagagaacaaaacaggcagaaatttctgtcttggaagcgctggcagcctagttgggcagaca[143 bp omitted]tgaaaccccgtctctactcaaaatataaaattagctgggcatggtggtgggcacctataatcccagctacttgggaggctgaggcaggagaatcgcttgaacccaggaggtggaggttgcagtgagccaagactgtgccaccgcactccagcctgggcaacagagcgagactccatctcaaaaatatatatatatatatacacacgtgtgtgtgtatatatatacacgtgtgtatatatatatatatatacacacgtgtatatatatatacacacatatatgtgtatatatatatacgtgtatatatatatacacgtgtatatatacatgtgtgtatgtgcgtatatatatacaggtgtgtatatatatgtgtatatatgtatatatatgtatatatgtgtatatatgtatatatgtatacatatatgtatacacacacacacacacacacacacacacacacacatatatatatatatatacactgagcccctaatgagtgccaagcattgttctaggcactgaagacgcaccaaagaaggcagaaatttctttttttttttttttttgagatggagtcttgctctgtcacccaggctagagtgcagttgtgcgatttcagttcactgccagctccgcctcccaggttcacgccattctcctgcctc[222 bp omitted]gttgggcagacagacaatgagcaaataaatccagaaaatctgtagggttttagagcatgctaagtgctgtgaagaaaatcagagcatggaaagtatcaggaagggacaagaattggaaagggagggcaggttgcaatttttttttaagagatggcgtctctctctgttgcccaggatggagttcagtggtgcaatcacagctcactgcagtcttgatttcctgggctcaagccatcctcccacctcagactcttgagtagctgggactacaggcgcacgccaccacacctggctaattttttttttgagacggagtctcactctgtcgcccaagctggagtgcagtggcatgatctcaactcagcgcaacctctgcctcccagattcaagcaattctcctgcctcagcctcctgagcagctgggatttacaggcacaatttttgtatttttagtagagtcagtgttttgtcatgtcggccaggctggtcttgaactcctgacctcaaatgatccacctgccttggcctcccaaagtgctgggattacagacatgagccaccatgcccggcctaatttttattttttattttgtagagatagagtctcactatgttgcccaggctggccgcaaactcctgaactccagtgatcctcccagttgcaattttaaacagggtcatcagggaggccctactgagaagaagatttagaccagagacctgaaggagaggaagaagggaaccaaagagagatctagggtaaaagcattcctggcaggaagaacagcctgtgcaaaggccctgaggcaggactatgcctggtgtgttggaggaacagtgaggaggcccatgtggctggggcagagccaagcaagaggcagaggggaaggagatgaggtcagggaaatgatggagggtagattgcgcagggccttggaaatgacaaagaagactttggcttatgccctgagatggaagcctcacgttctcactttagcatctccctgaggtagtcactaaaatggtgaagagtgtccactcctttttcccaacccattcaatggcagagattgtgggttggcctctaacatccattccccactttctcctttacaaatgaaacctgcccagctaaagactgtgttgcccggcctctcttgcaggtcagtgtgactgtctgacatattgtgaacaacgggacagaagcaggtgtaacctcagaagaaaataacaggccttcttcttcctcttcccccactgccccccacctgtgtctggaaggtggccaccatcacaggggccggagtagccactgtggtccacaagatagaagttgggggctgaggaggcagagcaacaagaccgaaggagccctgggtccctggtgattgtggagcctctgctgcagcctgggttgatgcccaggttatgaggacaggagtgatgagtgtcacccttgtttaagccatggtcttatgggtttctggcaacatagatcatgaataatcaaaagttgttgttttttttttcgagacggagtctcactctgtcacccaggctggagtgcagtggtgtgatctccactcactgcaagctctgcctcctgggttcacaccagtctcctgcctcagcctcatgagtagcttggactacaggtgcccaccaccacacccggctaatttttggtattctttagtagagatggggtttcaccatgttagccaggatggtcttgatctcctgacctcatgatccacccgccttggcctcccaaagtgctgggattacaggtgcgagccactgcgcccagctgaataatcaaaagttttgagcactctcactgcccctattgcagatttcagagtttttgttgttgttgttgttttggagacagggtcttgctctgttgccaggctggagtgcggtggttccatcacaagctcactgcagcctcgacctcacaggctcaagtgatcctcccactcagccttctgagtagctgggattacaggtttgagccacctttgatttttttttgtggagatggggtgtcgttctgttacccaggctggagtgcagtggtgccatcatagctcactgcagccttgacctcccaggcttaagtgattccccaacctccacctcctgagtagctgggactacaggcatgcaccaccacacctggctaatttttaaattttttgaagcagttagcggggggtctcactgtgttgcccaggctgatcctgaactcctggactcaagcgatcctcccgcctcaccctcccaaagtgatgcgaatacaggcatgaaccaccatgcccagccttccagacttttgctcttccgtgctaacactcccctgatgcaaaacgcccatcctctctcctctcctcctcccaatcttcctttggctcttggcctcgttcctccaaccttgctgcaaccaagctgtaccatgctacaagctccaccttgtggccagcctggtaactgaccttggctctcctcttcctgatgctgtccacttagtttttttccaagacttagttttattccaagatatgttcagggacatccatcctcccctacattccttcatcttcatatctccctccctctctcttccaaatttgcagttcctctagaaccaagctgggtcctttcaacccctatgttgtgcatttgtggtgattctgtaaggcagaaaggggaccagagagggtgaatgggctggctgggtcacacagccaagccatcctctccagaggaagctgaagagtgagcctggtcaagagaggatacaggctgggcatggtggttcacatctgtaatcccagcactgtgagaggccaaggcaggcgattacttgagcccaggagttcgagaccagcctaggcaacatcatctctacaaaagataaaaaaattagccaggtatggtggcgggtgcctgtaatcccagctacctaggaggctgaggtgggaggatcgcttgaggccaggaagtggaggctgtggtcagctaatattgtgccaggtatatatatatacctgggcatggtggtgcacatctgtaatcccagcaactctggaggctgaggcacaagaatcgcttgaacctgggaggcagaggttgcagtgaactgaggtcactccactgccctctggcctgggtgacagagcaagacactgtttcaaaaaaaaaaaaaaaaaaaaaaaaaaaaaaagaagattgatgacagagaccatgaaccttctggtctgaggacacaggacagcggggaccctcagacacagggccccccattagtcttccaggaaatccttctatcaaagctcaatgatctcattccttcctttgttccacaaacacttattgagcaactgctgtgtaccaagtcctatttggggtgctggaagcaaaacacacttgccctcttcctcccaggctagtgtgggaagcatgggtgaggtcagactgtgatgaaggcacccagaggaggcccctgacctgggccttgggcttcccagaggaggtgacgtggaggctgagatgtgaaagatgaagaggagaaagtagcatggtccatgctgagggaacggcaggagcagaggctccgaggtggggtggggtgggtttgagcccctaagaggcagccagttgtaatagaggccaacggcctgcagagctgggggcgagagcagggccttgatctcaagggcaatagggagccaaggaaggatttagagcaagggaggagtgagattggatttgcctttgaggaagattccaaagaggaaggaccggagggcacaaggcttgaattcagggcccaggacggggctgtgcctccttcaccacgtcctctgctgcgcccgggcgcaaggaggaaggagagccgggagggcgtacctggcagccaaaagcccagccgctaatgagcccggtgcggcgcgagctatttttagcagctgctcctcgggacgcctaatcgctccggccggctcccgccaggctgccatggaaacgctcgcgccaccgccaggagctccctcccggtcccggccggcgctgcccgcccctcagcccggggccaggatgatgcgtgctgccccccgccaggaaggagccctgcctgccttcccagcactgtcactgcacggctgtgcgatcccgggacatctctgcccctctctgggccttagagggcaagagaggtaaaggcgcgcactggaggctgagaagcacgtttgaatctccgctgggccaacgacttggggtgcaaggtcaggagtgtcccagaatctgagccctctttttgtcatctgaaaagcaagcccccgcctcatttaactgcggagagcacccggccccgaggaataagtgatttcagaattccaaacactcattaaacacctactgcatgccagccattgccctaagctctttttttttttttttttttttttgagacggagtggagtcttactctgtcgcccacgctggagtgcagtgggacaatgtcagctcactgcaacctccacttcctgggttcaagcgattctcctgcctcaacctcccaagtacctgggattataggcatgagccaccatgcctggccttttttcttttttttcttttttttttttttaagagacagggtctcgctctggagtgcagtggtgcaattgtgactcactgcagcgtcagcctcacaggctcaggtgatcctcccacctcactctctggagtagctgggcccacaggcatgcaccaccacacccaactaatttttgtattttttgtagagacgaggtttcaccttgttacctaggctgatctcaaactcctgggctcaagtgatccacccgcctcagcctcccaaagtgctgggattatagaggtgagctaccacccccggcctaaatttttatttttatttttatttttgtagaggcagagtcttgctttgttgcccaggctgggtcttgaactcctggcctcaggcaatcctcctgcctcggcctcccagagtgctgggatcacaggtgtgggccacagcacccagcctgccctaagctttctatgcattcacttgattaattaaatccagaggcatgttacaggttatgcattcacagatgaagccattgctgccaggaggttaactggctctccggatatggaggcaaggaagggacccaggcttactggatggggacgcagagggtgagaggcttccctcctccagggtgcaggtagggacactgaggcagagacgagggtagcaagttgcccaatgctgagagccctggagttgggctctctctcgcccaccgaggaaagctattatagaggggtcgtgggcgggtggcgcggggcagcccgccaacaactgacaccaggggctatttcaggaagtgtcactcagtcagttgggacaggctgaggcccaaggagggaggacaggaagaacaaagccctgacctgggccaggacagggaggtggaggcaggaaggcagagtgcatgagactgcagccatgtgacctacggcatgtctgctttgccgctccgggcctcaatttccccatctatagagatgaggtcttgctatgttgcccaggctgttctcaaattcatgggctgaagcaatcctcctgcctcagcctctcaagtagctgggaccacacgcacacatcaccataccaagttaatttttaattttttgtgggcacagggtctcacagcatagcaagactctatctctacaaaagaaatgaaatgggagaaggggatttaaaaaattaagttacattttaaaactgaccaggagcaatggctcatgtctgtaatcccagcactttgcgaggctgaggcaagagaatcacttgaggccaggagttcgagaccagcctgggcaacataacaagcaaaagttatttatttatattttttattttttcattttttattttttgagatggagtctcacactcttgcccaggctggagtacagcagtatgacctcggctcactgcaacctctgcctcccagtttcaagcgattctcctgcctcagcctcccaaatagctgggattacaggcacaagccaccgcatccagctaatttttgtatttttgtagagacggggtttcaccatgttggccaggctggtctcaaactcttgacctcaagtgattcgcccacctcagcctcccaaagtgctgggattacaggcacgagccaccacgcccggccaaaatttttaattttttagatacaaaaagtttaaaaattaactgagcatggtcatcccagctactcaggaggctgaggtggaaggatcccttgaacccaggacttcgaagctacagtgaactatgattgtgccactgcactccagcctgggcaacagagcgagaccctgtctaaaaataaataaataaataaataaaatacagcaagccacgtgctaaaaacagtgccaagtgtcacgtgatgctacttttcagctattatgattcaccgatcgcatctgccacgggacatcaggcctcggtgggctcacagggaaggtggcggaagagctggcctcatcccaggtctgagggtcgaccctgaaccacgagagagagggagagagaaaaaggagtcccaaggctggcacacagctgtcctgagctggcttccccactcccgcttcccaccaccctgcctggccggtgcctgcattttcacccttagggctgcctccatggcacctgcaccagcccctgggaggagatgctggagctgcccagagctgggggcccgagtggaacacaagcccccatcctccactcttccccagtcaccctggcagcggggaggggaggggaagggaggggaggccaaggttacagagcccctccccctgcctggctataattagccccgagatgaattaaacatgaggctgggcttgtctgcagcagcggaggcagcagcttcgtccctgacactataattgttcccgggcagcaggcagaggacagggctgatgtgtgaggctgggggaggtggggacacactcactgggcacggctgtgggaacacagctgtgtggggcctgtggacgtctttggcaggtacacgcgtgtgcccgcatgcacatgtgtgtggtcctcaggactctccaggcacgagggggaaggggtggtccttgggcctggagaaggctcaaggctcaggaaccccgggatgaaggtagcagccccacaaggggcatggagggggcactctccagccccatctccagcagccctgcggtgggggtgggcggccaccattaaagctgccaacagccagcacggtggttcacgcctgtaatcccagtactttgggaggctgaggagggaggatcacttgaggccaggagttcaggaacagcctgggtaacatagcaagaccccatttctacaagaagtttaaacattaactgggtgtggtggcacgcacctgtaatcccagctacttaggaggctaaggcaggaggaacacttgaccctgaaaggtggaggctgcagtgagccaagatcatgccactgcctgggagacagagtgagaccctgtctaaaaaaaaaaaaaaactgccaccatcaggattcacaccttcgtgggaagccaccattccaacctcccgtcacgaagtcccagactccctcatccacagcgctatcgggcactcgggcaccgtagctgtggttccagcattccggccgccaccagccactgtcatgctgatgggaacccatcagtccagtctgcagtgaacatgcctgtctggttctgtctctcccaggctgggagccccctcagggctgggtctctggaccccgcatggcccagctcaggtgggattcccataatgggggaacacttctggggtctttggagtttggggaggtggagaggctgtggatgagggaagcatcctttaggtctagaaacatctgcaaattgatggacatccttgggcctcctggtcatcatcttcccactccaaaaactattatccatccattttataagggagggaaactgaggctgggagagagccagtgacctgcccaagtggcacaacgaggaaggcacaga[136 bp omitted]cggtgaaaacccgtctctactaaaaaatttttttaaaaattagccgggcgtggtggcaggtgcctgtagtcccagctactcaggaggctgaggcaggagaatggcgtgaacccaggaggcggagcttgcagtgagcggatatcgcaccactgcactccagcctgggggacagagtgagactccatcttaaaaaaaaaaaaaaaaaaaaaaaaaaacaccattatcaggctgggtgcggtggatcacgcctgtaatcccaacactttgggaggctgagaagggaggatcacttgaggccaggagttcaagaccagcctgggcaacatagtgggaccctgtctgtacaaaaaaattaaaaaattagctgagcatgggggtgcatgggtgtggtcccagctactcgggaggctgaggcaggaggatcacttgagcccacaaaggtagaggctgcagtgagctatgattgtaccactgcactccagcccgggccaaagactgagaccctgcctcaaaaaaagaaaaaagaaaaaaaagaccactattagtcactcacaccttcacgaatatggccaactccctaggagagaaccctggattggattccagctgggttcaaaacccaggctggaagcattatgaggtcttgggcttttggatggggtgagagagagaggagggtgacctcaggcctgctcctctcctctctgggcctcagtcttcccatccaggagatgggacaatggcgactggagacagtcttgttgggggcagggaagacggtgtcaggatctcattccgggacgcccgccacctggccctgtaccagtgaaattcatttcccggaccctggcccaagaaatggtgaaatctctccagcagcctgctgatagcaactttaagtctttctgcagagaggaagggaggtgagagatggggagaagagaggggagtgagaggcaggggcctcggtcagtctctcagctgtaaacactccctccctctactaggatcagtgagctatgattgtaccacagcactccagcctgggtgacacaatgagacccccatctctaaaaaaaaaaattaaaaattaaaaaaaaatttaaaaggccaggcatggtagctcatgcctgtaatcccaacactttaggaggctg[133 bp omitted]gagccaggagaattacctgaatctgggaggcagaggttgcagtgagccaagatcatgccactgcactccagcctgggcagcagagcaagactctgtctccaaaaaaaaaaaaaagccgggtgcagtggctcacgcctgtagtcccagcactttgggaggccgaggcaggctgatcacctaaggtcagcagtttgagaccagcctggccaacatggtgaaacctggtctctactaaaaatacaaaaattacctgggcgtggtggtgcgtgcctgtaatcccagctacttgggaggctgaggcaggagaatcgcttgagcctgggaggcagaggttgaagtgagccaagatcacaccactacactccagcctgggagacagagcaagaacctgtctcaaaaaaaaaaaaaaaagaaagaagaagaagaagaatgttttcctcattcacagcccctccacctccccagactcgaaagaccccaggagtatcccgccattataggatcccacccgagctgggatatgcagtgttcagagacccagccctagagaggctcccaggctgggggagacagaaccagacagaaacctcacagcccaaacaaccaggccctgtgcagggggatctggtggctgagtacacggggccccctacagacaaagagtgtttacacgtggtaaataaagacactcccggtgaggggaacagccgaggcaaacacatggaggcaaaaagcaaaaaaaaaaaaaaatcccaaacttcctttgggaagccaagacagacagatcacttgaggtcaggaattcaagaccagcctggccaatatggtgaaacaccgtctctactaaaaatacaaaaattagccaggcgtggtggcgggcgcctgtaatcccagctacttgggaggctgaggcaggggaattgcttgaacccgggaggtggaggttgcagcgagccaagatcatgccactgcactccagcctgggtggcacagcaagacttcgtctcaaaa[147 bp omitted]cggtgaaaccccgtgtctactaaaaaatacaaaaaattagccgggcattggtggcgggcgcctgtagtcccagctactcgggaggctgaagcaggagaatgacctgaacccaggaggcggagcttgcagtgagccgagatcgcgccactgcactccagcttgggtgacagagcaagattccgtctcaaaaaaaaaaaaaaaagaaagaaaagaaagaaacccactctggtgtctatggtgcattcaaaatgacaaatcccacagccagaaaggctcttgcaaagtaggggtgattgagaagagcttacaccccccgcccagagctattataaggataaaatgagataaggagagtgtgtaaacccccagcacatactcagtgcttgcagagcagcttttgcaaccatggcaccaatcaagcccgtgtagatcatttttttttaacagttatatattcatttcaatgtatatattcccccaaatttatatacagcatctactctactcaaaaaagatgtatatctgggttttcatggcaggatataaagggtgcattttagaaatagatatattttgtcggaaaacaatgagaggaggagtcggtttagagaaaaatgatggtgggaatgaaggaagcctggagtcaggaaccgctcagagtaatagatttctcagcctgttcctgggcccagtaattaatcctgaggggctaattaaattccagcttcctctctagccactcagcagcctccctcctggcctccctctcccccagggaggcccggcctggcccgcccctgccagagcctccctcctgctgaaccgccaggcccccagttccctgggcttaatcatcaggaattaaggtttaatcagaaggttgcctgagaggaacagcctcccaggtgtacagccgcaccaggaatagggtgagctcagtgaggcgggctcgagcaaacgcagggtcagagcctgtcattcacttcacacttagatattttgttcatcgtctatgttttcataatcatcgtgacttcttttttttttgagacaaggtcttactctgtcacccaggctgcagtggaatggcactatcatggctcactgcagcctcaacctccctacctcaagtgatcctcctgcctcagcctcctgagtagctgggaccacaggtgtgcactaccacacctggctaatttttgtatttttcgtagagacgggagtcttgctatgtttcctaggctgggtcttgaactcctgaaaccaagcgatccttccaccttggcctccccaaatgctgggattacaggcatgagccatcctgcccagtctcctcatgactttttttttttttttttgagacagagtcttgctctgttgcccaggctggagtggcgcgatctcgactcagcatctgcctcccaggttcaagcaattattctggcctcagcctcctgagtagctgggattacaggcgcccaccaccacgcccggctaatttttgtatttttagtacagaggaggtttaaccatgttgaccaggcttgcctggaactcctgacctcaagtgatcagtctgccttagcctcccaaagtgctggcattacaggcgtgagccaccatgcctggcccctcatgacgtttttcaatgttgcatcaaactactgtttatcttggtgactgagttgaacggcacctccttaaattttgcactgaggtgggtgccttgctctctttaccctaattctggtcccaactcctccacgcatgcacaaagccagcaactcctaagcatcttgagacctgaagctcatttcagcttcaccgctgtctgaggacaatctgttattgggcccattttatggatgagaaactgaggcccagaaggtcaagtcactggctttgggttccttggctaaggggaggcagaggcaggatttgaacccaagacgccactgagatggggttgctgcctgtcctgaatccagagacaatgcaacccgcttcagagcaccctttctgaagtgtttttgtttttgttttcttgtttgttagtttgttttgagaccaggctggagtgcaatggtgcaatctcggctcactgcaaagcaacctccacctcccgggttcaagcaattctcatgcttcagcctcccaagtagctgggactacaggcacacaccaccatgcccagctgatttttgttttttgtgtttttttgagacggagtctcattcttgtcacccaggctggagtgcagtggtatgatcttggctgactgcaacctccacctcccgggttcgagctattctcctgcctcagcctcccaagtagctgggactacacgcatgcaccaccacacctggctaatttttgtattttcagcagagatgaaatttca[142 bp omitted]tgtccctctagagaacctctagagaacaaatactttaatattaatctatcaggtatccttccccactttataccacccttatctagtctatgggggacactactaatctatcaagtaaccttccccacttcctgccacccccacctgtatgtggactacaatagaaagagagacttgaggctgaaggaagcccagcgtaggtatgaggacttgttctgggctttgacgcatccataggagttttctaggtatgagtagggtctgctgaaagggctttactgtgtatgcaaaagcctagagaagtgaaggagagtgtgactcattcatggactaataagtttgtctccttgaagctggagaggccttgaaggccagaaaaggagcctgaacgtcatcctgttcatcctgttcacagtgacacggtcacccaggctcaattccactccccatcttccagtttctcggcttcctccaacacccgacctagctcccaggtgttaaggtcagaagtgaatgcacctgtgaattagtgaaggaatgagtgagcagaggcagctgcttcaaggttgtgtggtgatacatccttctgaaccctgccccggtgcttcacggtacaggctccagagaggactcagcctgggaccctgcccccaaggatccccaggctgggactgtgggatggagctggacacagacacccaagctctgcagagtcagggctggtgctgagcgaccttggaggggaggacattggagctgcgtgcaaagcttttttttttttttttttttttttgagagagggtctggctctgtaacccaggctggagtgcagtggtgcaatctcagctcactgcaacctccacctcccggacccaagtgatcctctctcccaacccagaaggcggaggtttcagtgagccgagatcgcaccatcgcactccagcctgggcaacaaatatggatgtgggggaataggcaagcaggtaggtggatgtggctggctgcgtggaaagaacaggggtggtgggggcagccaaggatcaatcaggcactggtgagaagttctagcttcatcccgaaggcaatgggagccatggagggctctggacagaggagagacattgccagacccaggtgctcacaggaacccttctgggggctacagcggcaacagattgtgaagggaggtgattgcattggtctgggaaagtgacgatcatgtacctaaacccgcgttgtccaacgtgggagccactggccacatgtagctattgag[134 bp omitted]tctactaaaaatacaaaaattagccaggtgtggtggcacgtgcctgtaatcccagctacttgggaggctgaggcaggagaatcgcttgaacctgggagatggaggtttcagtgagctgagatcacaccattgcacttcagcctgggtgacaagagtgaaactctgtctcagaacacacacacacacacacacacacacaccccagaaaaaatagctcattcacaattttttctatagattgcatgcttaaatgataaaacacattactaaaactaatttcacctgtttctttttactattttttattttttgagacggagtttcgctcattgttgcccaagctggagtgcaatggtgtgatctcagctcaccgcaacctccacctcctgggtgcaagtgattctccggccttagcctcccaatcagctgggattacaggcgtgcaccaccacgcccagctaattttgtatttttagtagagaccaggctggtctcaaactcccgacctcaggaggtccgcccgcctcagcctcccaaagtgctgggattagaggcgtgagccactgcgcccagccttctttttactgtttttttcttgtggctaccaggaaatctttaattgcccacgttgatggcatttgcatttctaaaatgctgcagcctttgcaccgaccaccagagagtgctgtgcccatgtggcaggatcaagcaatccggaatctgaaggaaaagaaagtagttcaagctgacgatcagttagatcagttcttacaatggagacacgtttaccatctggcatctttcagcatctaagggagacagatctgcctggagatagggagtctgccgctgatcctcacaccattttatcctgct[132 bp omitted]ctgcaacctccacctcctggacccaagtgatcctcccaccccagcctcccaagtagctgggaccacaggtgtgcaacaccataccaggctaatttttgtagtttttatagagacagggtttcactatgttgcccgggctggtcttgaactcctgagctccagtgatgcctgccttggcctcccaaattactgggattaaaggcgtgagctacagcatttattagatacctactgtcaggcctctgagcccaggccaggccatcgcatcccctgtgactggcacgtatacatccagatggcctgaagtaactgaagatccacaaaagaagtaaaaacagccttaactgatgacattccaccattgtgatttgttcctgccccaccctaactgatcaatgtactttgtagtctcccccacccttaagaaggttctttgtaattctccccacccttgagaatgtactttgtgagatccacccctgcccaccagagagcaaccccctttgactgtaattttccattaccttcccaaatcctataaaacggccccacccgtatctcccttcgctgactctcttttcggactcagccggcctgcacccaggtgaaataaacagccatgcttctcacacaaagcctgtttggtggtctcttcacacagacgcgcatgaaatttggtgccgtgactcggatcgggggacctcccttgggaggtcaatcccctgtcctcctgctctttgctccgtgagaaagatccacctaccacctcaggtcctcagtccaaccagcccaggaaacatcccaccaatttcaaatccggtaagcggcctctttttactctcttctccaacctccctcactatccctcaacctctttctcctttcaatcttggcgccacatttcaatctctcccttctcttaatttcaattcctttcattttctggtagagacaaaagagacatgttttatccgtgaacccaaaactccggcgccggtcacggactgggaaggcagccttcccttggtgtttaatcattgcagggacgcctctctgattatacactcacgtttcaagggtgtcagaccacgcagggacgcccgccttggtccttcacccttagtggcaagtcccgctttcctggggcaggggcaagtacccctcaaccccttctccttcaccctcagtggcaagtcccgctttcctagggggcaagaaacccccaatcgcttatttccgcaccccaacctcttatatctctgcaccccaatcccttatttccacaccctgacctctttgtgccccaatcccttacttccgtgccccaaccccttctctgcttttctggagggcgagaaccccccaccccttctccgtgtctctactcttttttctgggcttgcctccttcactatgggtaagcttccaccttccattcctcctccttctcctttagcctgtgttctcaaaaacttaaaacctcttcaactcacacctgacctaaaacctaaatgccttattttcttctgcaatgccgcttgactccaatacaagctcgacagtagttccaaatagccggaaaacggcactttcaatttttccatcctacaagatctaaataattcttgtcgtaaaatgggcaaatggtctgaggtgcctgaagtccatcagtcccttcctactctctgtgcccagtgcaactcgtcccaaatcttccttctttccctcccacctgtcccctcagtcccaaccccaagcgtcgctgagtctttctcatcttccttttctacagacccatctgacctctcccctcctcgccagcccaagctaagtcccaattcttcctcagcctctgctcctgcatcctgtcatttttttatcgcctcccctcctcacacctggtccggcttacagtttcgttccgtgactagccctccccctcctgcccagcaatttactcttaaaaaggtggctggagccaaaggcatagtcgaggttaatgctcctttttctttatcccaaatcagaagcgtttaggctctttttcatcaaatataaaaacccagcccagttcatgacttgtttggcagtaaccctgagacactttacagccctagaccctaaaaagtcaaaaggccgtcttattctcaaaatatattttattacccaatctgctcccgacattaaataaaactccaaaaattaaattccggccctcaaaccccacaacaggacttaatgaacctcgccttcaaggtgtacaataatagaaaaaagttgcaattccttgcctccactgtgagacaaaccccagccacatctccagcacacaagaacttccaaatgcctgaaccgcagcggccaggcgttcctccagaacctcctcccccaggagcttgctacacgtgccggaaatctggccactgggccaaggaatgcccgctgcccgggattcctcctaagccgcgtcccatctgtgtgggaccccactgaaaatcggactgttcaactcacctggcagccactcccagagcccctggaactctggcccaaggctctctgactgactccttcccagatcttctcggcttagcggctgaagactgacgctgcccgatcgcctcggaagccccgtagaccatcacggacgccgagcttcgggtaactctcacagtggaaggtaagtccgtccccttcttaatcaatacggaggctacccactccacattatcttcttttcaagggcctgtttcccttgcctccataactgttgtgggtattgacggccaggcttcaaaacccctgaaaactcccccactctggtgccaacttagacaacactcttttatgcactcttttttagttatccccacctgcccagttcccttattaggccgagatactttaaccaaattatctgcttccctgactattcctggactacagccgcatctcattgccgcccttctccccagcccaaagcttccttcacgtcttcctctcgtatccccccaccttaagccacaagtatgggacatctctactccttccctggcaactgatcacatgcccattaccatcccattaaaacctaatcacccttaccccgctcaacgccaatatcccatcccacagcatgctttaaaaggattaaagcctgttatcactcgcctgctatagcatgggcttctaaaacctataaactctccttacaattcccccattttacctgtccgaaaaccggataagtcttacagattagttcaggatctgcgtcttatcaaccaaattgttttgccatccaccctgtggtgcccaacccgtaccctcttttgtcctcaatccgttcctccacaactcactattctgttctccatcttaaagatgcttttttcactgttcccctgcacccctcgtcccagcctctctttgctttcacttagactgaccctgacacccattaggctcagcaaattaccaaggctgtactgctgcaaagcttcacagacagcccccattacttcaatcaagcacaaatttcttcctcatctgttacctatctcggcataattctcaaaaacacacgtgctttccctgccaatcgtgtccgactgacctctcaaaccccagcacctacaaaacaacaactcctttccttcctaggcatggttagcgtggtcggaattcttacacaagagccaggaccacaccctgtagcctttctgtccaaacaacttgaccttactgttttaacctagccctcatgtctgcgtgcagcggctgctgctgctttaatacttttagaggccctcaaaatcacaaactttatcagtcctccaggcccaagttgactctttagctgcagttgtcctccaaaaccaccgaggccttgactgacttactgctgaaaaaggaggactctgcatattcttaaatgaggagtgttgtttttacctaaatcaatctggcctggtgtatgacaacataaaaaaactcaaggatagagcccaaaaacttgccaaccaagaaagtaattacgctgaacccccttgggcactctctaattggatgtcctgggccctcccaattcttagtcctttaatacccatttttctcctccttttcttcagaccttctatcttccgtttagcttctcagttcattgaaaaccgtatccaggccatcaccaatcattctatacgacaaatgtttcttctaacatccccacaatatcaccccttaccacaagacctcccttcagcttaatctctcccactctaggttcccacgccgcccctaatcccgctcgaagcagccctgagaaacatcgcccgttctctctccataccaccccccaaaaattttcgccgctgcaacacttcaacactattttgttttatttgtcttattaatataagaaggcaggaatgtcaggcctctgagcccaggccaggtcatcgcatcccctgtgacttgcacgtatacatccagatggcctgaagtaactgcagatccacaaaagaagtaaaaacagccttaactggtgatattccaccattgtgatttgttcctgccccaccctaactgatcaatgtactttgtagtctcccccacccttaagaaggttctttgtaattctccccactcttgagaatgtactttgtgagatccacccctgcccaccagagaacaaccccctttgactgtaattttccattaccttcccaaatcctataaaacggccccacccctatctcccttcgctgactctcttttcggactcagccggcctgcacccaggtgaaataaacagccatgctgctcacacaaagcctgtttggtggtctcttcacatggacacgcatgaaacctactgtgtactttgctttctttgctcttggtgattccccaaaaaacttatctcaacatataaggatttttcttttctttttttttttttgtttgagacggagtctcgctctgtcgcccaggctggagtacagcggcgcgatctcggctcactgcaagctccgcctcccgggttcacgccattctcctgcctcagcctccggagtagctgggactacaggcgcccgctgccacgcccggctaatttttttgtatttttagtagagatgggtttcacc[140 bp omitted]caaggctcagagaggtcagtggtgcaatctcggctcacagcaacttccgcctcccgggttcaagggattctagtgcctcagcctcccaagtacctgggatcacaggcatccgccatcacacccagctaatttttgtatttttagtagagacagggtttcgccatgttgtccaggctggtctcgagctcatgacctcaggtgatccgcccaccttggcatcccaaactgctggggtaggattttcttttttacttccctttttccaaatgagaaaaccaaggctcagagaggaagagcgtgttgccccaagtggcccagcagagccacagccttgcccccagcagctctggctctaatgcattccagactcctcccatcagccaactgcctcccatcctctaataaacttctgagaagcgctgggcagatgcagtggcgcccacgctctttatctgcccagatcaggccggctcagcagagcagtcgataattaattctgaattctccccatttatcacggcggcaggagccagagtgcctggaatcccaatcccaaacctccgtgccccttggtcacctggaccaaggcccagtggtggcaggaactatggtggagagggggcctcattgagcctgggaagggagcaaaggtgttcctggctccccaccgctccctggcgctgggttattaaacgctgtgtactgcagcagtgaccaaaccagacctcttccccgtcttcatggtgcccacaggctagtggggaaaacatacattgaatgaataataatataaataattaatgctacaaaggaaaagaacaagatgttgtgagaatacaaaacaacaggaacataacttgttttgggggcctccccaaggaagtgacattgaacctgcaaatcacagggtgaaaggtgaaaggttgggagagggtatttcatatacagaaatagcccatgcaggctgggtgcggtggctcacagcactttgggaggcca[134 bp omitted]gagacaggattctcacctcctggttcgcttgaacccaggaggtggaggttgcagtgagctaagatagcgccattgcactccagcctgggcaacagagctagactctgtctcaaaaaaagaaaaaaaagaaagaaaagaaaagaaatagcctgtgaaaaaaaccttgtggctggagcccagcaaggggtttagtaggtctgaagcttaaagcacaagtgtgaggtcagtgccaagtcaggggacctcagggccaggcctggagccctcatagtgaggccagcagccttcagtggatagccaggggccaccaaggaaagagatggataagtttccgtgatgctccaaggggtggtagtgaggctgcttctgccccaggtgcatcaccctgcaaggtcagtggtcggctctgtgttgttttttttttttttttttggtttgtttgtttttgagacggagtctcgctctgttgccaggctggagtgcggtggcgtgatcttggctcactgcaacctccgcctctcgggttcaagcaattctgcctcagcctcccaagtagctaggactacaggcgcctgccaccacgcctggctaatttttatatttttagtagagacagggtttaaccatgtcggccagaatagtctcgatctcttgacttcgtgatctgcccgcctcagcctcccaaagtgctgggattacaggagtgagccactgcgcctggccgggtttttttttctttcttatgactgttttcctttttgagggttctttcaaatccatttgggcacgggggttagtcaggatttgtctgccagcaaacaccgaatgcctggctatcccaaacacttcccttcttgggcaggcagggaaactgaggcccagcgagggacaaagaacacccaaggtcattcagaggaaggttgtgtgtgggagaggtttctggggagtctcaggggccatgcgcttgccctgcagcttctgtggcttttgttgggccgtgaactccgtggggagcttgactgggtatcctagtcaccacgctgtcctcagagccctgcaaactggaggtgcttaatcagtgattgtggaatgcatgatcccagcagcttctgaagacaccccagaggtcatgcttacgatattggaaggaaagggggtctttttttctttttctttttttttgagatggagtcttgctctgttactcaggctggagtgcagtggcacaatctcggctcactgcaagctccgcctcccgggttcacgccattctcctgccttagcctcccaagtagctgggactacaggtgtgcaccaccaccacgcctggctatttttttgtatttttagtagagacagggttttgccatgttgcccatgtccaggctggtctcgaactcctagcctccagcaatcctctagccttgacctcctaaagtgctaggattacaggcatgagccactgtgcccagccaactaatgttttcattatttattttttaaattttaatgttatatttcttaattttttattttatttttatttatttatttatttatttttgagatggagtcttgctctgtcgcccaggctggagtgtagtggcgcaatctcggcccactgcaagctccacctcccgggttcacgccattctcctgcctcagcctctcgagtagctgggactacaggcacccgccaccacacccagctaatttttcactgtgttagccaggatggtctcaatctcctgacctcgtgatccgcccgcctcagcctcccaaagtgagccaccgcgcccagcctattttttctttttttttttttttctagagacagggtctcgttctgtcacccagtctggagtgcagtggtatggttatagctcaccgtggtctcaaactcctgggctcaagtgatcctcctgcctcagcctcccaagtagctgggaccacaggggcatgccaccacacctggataatttttaaatgcttttgtaaaggctgggtctcgccatgtttcccaggctggtttcgaactcctaggttcaagcaatcctcctgcctcggtctcccaaagtgttgggattatagtcatgagccactgagcctggcctagggaaagaggggtctttttcaataggagatttgagaaaaaaatacagagacatggagagagacagagactgagatgcagacgaactgagaaacgcagagagagagatattgaagagagggagagataacgagatacaaacagaaccacagacagaaatggagcgacagagagcagatgaaaaagaggccgggcgcagtggctgatgcctgcaatcccagcacttcgggtggccgagacgggtagatggcttgagcccaggagtttgagaacagcctgggcaacatggcgaaaccccatctctacaaaaatttaaaaattagctgggtgtggtggcgtgtgcctaaaatcccagctactcaagagcctgaggcgggaggatcgcttgagctggggaggttgaggctgcagtgatctgtgattgtgccaccgcactccagcctggacaacagaacaagaccctgtctcaacaaaaataaaataagagactgagacacagagacagatgaagggagaggagagagagagaaagaaagatggcaaggtcagaaccagcactaacttgtatgggagctgttggatgaattacaaagaagggccccttcctggggccctctcacctctgcagctgggtcctcttgtgcagtgaacaacctgccccactgtctgtggcagccggagcagcatctgtctttatatctctcattgaatgaatgctcagagttaggagaatgccagagcccagcctggagtcgcacagaaagagaacagagagatagaggcagggcaggaaggaagtggcaattccaggtcctggcagtttctggctaaaccgctgacatctcctctgggaaccgcctgggctcacttgccccctaggagaattcccttggaccttcttggagcacaaactaggtgggcggccaagacgggaggtggcccctccccagaacgccgcgggccttagcgagacggcagctgccaagtctcacccgaaactcctcatagcccagacttgctcagggtggagcccagagtctgagaggccctggcggggagcgagcaggattccctgagtttcacagcccagatatgggagggggctggcctggggtcaactggagtaacagtgtcacctggagtaacagcgtcacctggagtaacagcatgtgcaaaggcctggaggggagtgagaggaaggtagaagtagagctcagcccaaaaccatagatggggtagaatgaagcccaagagagctccaaggccaagttaggaagcttaaactcaatcttgttttcaaacatgtaatcttttattcagtacactctcaaaacagcatttctgtatctagttccaagctgggtgatcctgcggccccaaaggtagtgatgactctgctgggaggagacacagacctcccagttcagtggatcccgagtgagtcagaaggtgagactggaagcagcagggtccttgagggaagtaggctctccttgaaggataagcaatggctgcatgaagtagcaggtattgaagctagggctttgaaggatgaataggagcttgccaaacaaagaaggtgggacatgcaaaccaagtggagggactgtggcccaaactcagggatacatggatggagtagcaggagaaaaacagactgggggagcaggaagagtcagtgtgagctttctccagatccaaaatcagcagcctgtcattcaaggccaagacattccacaatagttccccttggccctgtcaagcctatcaggcctggagcttcctcaaagcagctctgacaactccagccactgtcatctcccctctttgtgtcacgaggaccatgcactttggtgcatggtgacattcagtgggggctgctttcctcggtgtggctgtgggaccttaggcccatgcctcagtttcccaacctggaaaatgggctgcaggaagccacttttgcaacttatgtttatctcaggccagggaggtcttggacaaatgatgtgaaggaagaagagaaaaatggaagatagggagggagaggaaaggaagggggcgaaggaagggagaacagatgggaagggaagggaagggaagggaagacggaggaaggaaaaggccgtgcacctcccgacccaggtcatcatcaagggacaggtccaacattattatttcagaacatgccagcgctgtcgaggcttaagaaatgggtggtgatttgcatgcgatttgcatgtgatttgcatactgtttgttaaatgtcaaaacaccctgaaaatgctttctcccacctccacccccagtggagaagcgggaaacccttccccacttcctccaccagctcccggcatgggttggggacgcctcagttcagagggtggtgaccttgggcaagccaaaagccatctgtaaaatgggctgttatcctg[138 bp omitted]gcctcagcctaccaagtagctgggactacaggcgcccgccaccaggcccggctattttttttgtacttttagtagagacggggtttcaccgt[138 bp omitted]aagtcctggcatggagtaaggaccaaggaatgaaactggggagattattaaatgccccattttcttgccaaaccctgacgaggcatgtccctgaatatgcacagggaaatgaggacagaggggacccaggctctagatacacgcatgtggcccagctgttagcagaggcccaaaccacgcatgagcagggatctgggctgcctccccctgctgtgtgtccctgacaacctccttgggcctcaggctaccctctgcagaacagacagcagcagactctgctctaggaggagctccagggggcacacagtgggtctctggggacaaagtcctgggttaggcaccaaggggagaggtggagggggataggaagacccccctccaggcacacccaggggccagcaagacccaagtcattctgcaaagcagctccagcaggtctgcctgccggagtgaagtggggctcctctctcttcccctccttctccccctcctctcagccaagcgggaattgcagggtagatgcccgaagtttggcagatgctctgaagggaggcgagcaggagaccccgggccaagtgctgtccccgagctaagcaaacgcacagtctgggcacggctgtccccgtggtggtgatttactatccacctgtccatgctctgagtcctgcagccaacaggactcttaactaaaacattatttcttcccagcctctggcgcctccgcccatggtgcctggagagtgtacacggccctcgaggacatgcgtagcctcggcaccccctccccaaagaccctccccaggggctgcgcaacgatgacgtggctgcaggtcagaggtgcaacggaggcccggcacactgccctgagggtctccacccggaattcccacaacgcactccctgcaatgccccgcgatgacctcccacagctaggcccagttccccacccccagatcctcgtcctcttggccagagttcttcagaaccccttccccgctgccccaagaccctatgcaagacgaggcatccggatttaaggggaagggggaaacagcccagggggtgggcacaggtgcctcctggggaggtatttgggggtggaaatggggcacagttggaggcctgagaaggagctaggatgtccgcatctccccgcttagtcattggagagttcggacacgactggctgcacccccagccagggctgttcactgcacaaagggcctgtgggggccccaaagaaggctaggtgctctctggctgggaaggagggaatctgagaagacttcctggaggagactgcaatcccaggtgtattggagctgcagagaagaggttgaaaagtgctccaggcagggggcacggcttgggcaaaggtgtggctgggaaaatgtcctgggcaagagcggaagtgcctctgagtgtctctcctgccccttctgtgcttctcttcttgcgatgccctctggctgcccatgggagctttccaaggtggcacagtgctttccactgaagacagggcacccagggccccaagaggggagcaacaacctcaaagtcacacagcagagctgaaaggctcaaggctccctcccgataggctgggcaggagcaaaaatgtcctaggtccttgtcagggactggggctccagcaggagtgtctgaagcagtgtgcatcagctggtcaggccagggtttcatggtccacctgggagcccagaccctggaacaacaggaggggaagggtaaacccgtttcaatccaggaccagggaagggtgaaacaccagttctccagccatttgtcctttccttttacctaacatccctgacacggacagtgatctgcagtcatcccctcctgtggatgtcccttgtgtcctttaagaggaacagggatggcccctggtgaatttggctgttttcttttttctttcttttttttgagacagagtcctgctctgtcgccaggctggagtgcaatggcgtgatttcggctcactgtaacctctgactcctgggttcaagcgattctcttggaacttggctgttttctgccacctgatggcagtcacaggaattgcaggcaaagagtgcagtaaagccaaatcaaagctcaatcctttattgtaaggagacaggtaacagagcccagagaggagaagcaattttcccaaggtcacccagcaagtcaggggcaacacggctctggtccacgtgttagtccaaaaagaaatgagacaccaaggccatgtccctaccctagaggccagaagcataagtgtatggagggggatgatggtcaataacatctgtctcttctcctctctgggcctcagtttccccatctatggtctccacaatctctaaggtcctttctctttctcaactactacaattacttacctggagtgagatctaggctcccgggaggcaggagaagtgccttccaaaagtgccctctaccccagcctattccttcagccagtacccaggtccccttggtcatggctctgcctcctccaacccagactacctgaaagagggagacagaaagacacaggttgcagaaaaaacatagcccttgccttggcgttcaaggcttccctattctgcccactgtctggctggtgcctcttcctgcccctgccagggctcacctctgacccagaaattccctcccctgcatccaggcaccgctagagctccagaaaaatattctgagcagcccaatccttgcctctgctcacgattatgttagtgagacaatacatctcactaacatttattaagcacctactatgtgccaggcactgaactggcaatccagcagggaacaagatggacggcagtaccctcacagagtttacagtctactgcaggagacaggtgaaaaaaataagtaaaacgtagagaagtcggctgctgacaagtgatggggaaagagagaaagcagggatggcgtgaaataaaattttattatttatttctttagagacggagtttcaccctgtcacccagactagagtgtaatggcacgatctcagctcactgcaacctccgcctcccagactcaagcgattctcttgcctcagcctccccagtagctgggattacaggcatgcgccatcatgcccggctaatttttgtagttttagtagagatggggtttcaccatgttggccaggctggtcttgaactcctggactcaagtgatctgcttgcctcagcctcccaaagtgctgggattgcgggtgtgagccgctgcgcctcgctggaatgcaattttaaacaggatggtcagggagggctgcaggaagagagggagttggggacctgagggaacagcattccaggctgaaggaacagcctgtccagaggctctgaggcagcgaggaggcctgtgtggctggagcagagtgaggaaggggaagagagggaggaggagcaagcagggagggaatacagcaggtcatccagggtcttgcaagcctcaggaaggacttgggctttgaccctgagggaggtgggagccatggagggctgccggcagaggagggacacgccccgactcaggggctcacaggcgccctctggcacctgctacggggaggacagacttgtaggggacaagggcaggggctgcggaccttggtggggggcaactgggctgggccaggggttgagaagtgggaggattatggttagactttgaaggcggagctgatggaaccagctgaaggacagatagaggggcttgggaggaagagaggaatagactgatgtcaataaaatcagaataataacaactgttcccactaatggagcagggagaaggtttagtgatgaagggcgtggctttaaagctgggtttagaccctggctctgccccttcccagcttaatcttactctgcctcagcttctccacctgtaaaccgccaatgataacggcacccggccaggcacggtggctcacgcgtgtaatcccagcactttgggaggctgaggtaggcagatcacctgaggttaggagtttgagaccagcctggccaacatggtgaaacggtctctactaaaaatacaaaaaaattagccaggcatggtggcgggcgcctgtaatcccagctactcaggagactgagg[132 bp omitted]gccaggggacagcggtaaggccacgtgaaaagcccctagcatctcaaaggctctcaaagcatgaccatgactcagtgcctgctagctcccgtgacaacctgtctccctgcaacgctgctgcctcgaggcagaaaatgttgtcactactgcatttcacagagtgtagaaacaggaggtggcaagagaggctgggggagggagaagagggggccctatctacccggaagtgagagagggcctggcaggtttgtcccgagcagcccacgcagcttctctctccctagggtaccgtctgcgctgacaggtcccaagtgtttttctcatttctcacatggggaagctgaggcctccccggctgctgctgcaccatccactagtagcccctgctctgcctctagaggtctgggagtggtctggggagctcagaacccatttgatgcccagagagggtgggttagctgcctcgggacacacagccagtgaacagcaaaggcagataggggcccctgtctgttggggaagacaaagctggactctgccatcaaccccagctgtgtgtgtggtcagggatgggcaaggggcagggcattaggacagggtgggagcccagaggaggttgaaactctctcttttttcttttgttttgagacggagtctcactctgttgtccaggctggagtgcagaggcacgatctcagctcactgcaacctccgcctccaggttcaagcgattctcctgcctcagcctcccaagtagctgggattacaggcgtatatcactatgcctggctaatgtttgtatttttagtagagacagcgtttcgccatgttggccaggctggtctcgaactcttgacttcaggtgatccgcccaccttggccccccaaagtgctgggattgcaggtgtgaaccattgcgcccagccaaaactgtctcctctgaaggcttctgttctctgcctccagcatggctcactgggacctcaccctggtctcctgtctccagccctccccccatcacagtctgttctccccgctgcagccaggggttgcctgtgagcattgagtcaggtcccgtccctcctctgcccacagccctctatggctcccacctccctcggagtcaaggcccaagtcctccctgcagtccgcaaggccctgcatgaactgccctggcccctccctgccctcccttcctccctctctcccccttgctccagccacacgggcctcctcgctgttcctccaacatgccaggtgcagtcctgcctcagggcctttgcacaggctgttcctactgcctggaacacccttccctgactctctgtttaaccacctcctccacatcatagcctgacatgtcacctttccggagaggcgtcccccagtcactgatccctctccaccttccctgcatcccccacagcgccaattgcgagttgacattctcctgtgctattatttggctctaggctctgtgaaggcgaaatctggtctctctgggtcactgctgaatttcagtgtccagcatggagtctggcacacagtaggcacacaataaatgctgactctgtactgcataattacagtctggacgtctgagggtcgtccagcccccagacctcatagaaggtacgctgccgagaacaccctctcctagccccaagctctgaacctccatccctcatcatcctctcagcctccccgtccccgctaagatcttccctcaagagggcctggggagggggcctctcctgcccccattgcagccccagactcctgcaacggggtggcatctgaggctcctgccctcaaaacatcaacccaggctcggtgactcaagcctctagagggctggtgaatgtgacccccataaaatccagggtaattcacatggcccccgtccctctcctgttcaatgcttccaaggaggtggtcccaggctctgagacgaggccccaccatcttcaccacctctcggccatcctcgacccatttcccagagctgccccaggccggcagtgagctgttcccgtggccccagcgcccttctctgcagacccctccttgggccagaagacgccccacttgagggtcgtcttggccaggggacctctttggggacccagatatccaagtgtgagtgtgggtaacggacactggagtggggctgtgggaaagataaggcggtagggagagaccagagaaggaagagagagacagagcttcagagacagagaaaaacagcagagaaaaatgcagagacaccagagagataaagagacacagacacacatgttgagacacagcgagaaaaagagcagagaccaaaataacagagacagagacacagagagagaaatacacagcgggaagagacagaaatggacagagacacgcagagaaacagagagacaaaagagacacacagagagaaaaagagcagagacagaaatggagagagacagagaaagagagacagaaatggagagacacacagaggaaagaaagcagagaccaaaatgggcagagacacagagagagacagagacaaaagagacagagactcacagagacacagagagagatgcgcgcacacacagacagaactggacagggacacagagacagagacacagagagacagagagaaaaacagcagagacagagacaaatggacaaagagacagagagacagggagagagagacacacacatacacagacacagagaaaaacagagacaaaaatggacaaagagacaaaagagacagacacagagagacacaaggagaaaaacagcagagacagaaatgggcagagacacaaagagacaaaggggaagagagacagagacacacacacagaggaaaaaagcagagaccaaaatggggagacagagaccagagagggagacagaaaagagagagggagacagagatgagggagaaacagggaggaaaacagcagagagagaagtgggcagagacacagagtgacagagaaaagagagacagagacagagacaatcacaggcaaccaaatcatcagggaaagaaataaacagaggcagagatggagagagacacacagagaggaaaaaacagagaccaaaatggagagagagacagagacaaagacaaaagagagagaggtgaggagacaaagatgagagacgcagagataaaagagacagagacaagagacagaaacaagagggagacagagataagagatggagatgagacagccacaaaagagatgagagagacaaagatgaaagagacagagataaaagagagacacagacaaaagagagagatgaaagagacaaagagaggcacagagataagagtcagagacaagagacagaaagaagagggagagagatgagagacagagacaaaagaagaagagacagagatgagagacagagacgagagagtgacaaagatgagagtgacagagacaaaagagagagaggcagaaaaacagcagagacagaaacaggcagagaaacaggcacagacagagagcccgaaagcaagacctgacaccggcaaggccgggtcaggagagaggccgggcgggcagcgcgaggtgggaaagcagtgccggcccgggaggccgccttgggcgcccgcctcccccgccgctctccaggggtccccggccgccgcccccgccccaccccaccccgagccccgcggccacctggggtcgctgacgagcagcagcaccgagccgtcctgcaggcgcgcgtcgcgcaccgtctggtggtcgtccagccgccgcgcgttgtagtagaaggcgcgcttccaggagctcacgccctggcccaccagctgggcgcgcaggtcgctgagcgtgtcccgcggccgcacggtcagcggtagcagcagcgcctcgtccgccaggtgcaccttgatgtggtagcgcttccagcgcgacagcccccgccgcagcccctccatggcgcccgcccggctccggctccagctctggccccgggccccgagcgccccgcgcacccgcccgactagcctggccgcccgcccccgccgcgcccgcgctccgcccgcccggacacgcccggcacgcagtgggcaggcccggcccggcggggcggggcgggtgccacggtcccctcaggcgtccgctccccactgctggccccagagtgcgcccgggggtctagaggcggagtggccactcagcacagagccatcagcgaggtcatcccagccaaggagacgcgcgaatgtccagggggttacatggtggaggctccagggagggaggctgggaggccactttatttgatctttttaaggacaggctggagcgcagtggcgcaatcatggttcgttgcagccttgacctcccgggctcaagcgatcctcccgcctcagcctctcaagtagctgggactacaggcgctgccaccaagcccagctcacttttgtagtttttgtagagatggggcctggccgtgttgcccaggctggttttgaactcctgacgtcaagtgattctccgccttggcctcccaaagcggtgggattataaccctcagccaccacgctcagcctacattaaaaaaaaaatttacttttaggccaggtgcggtggctcatgcctggaatcccagcactttgggagactgaggtgggcggatcacatgaggtcaggagttcgagaccaacctggccaacatggtgaaaccccgtctctactataagtacaaaaattagccaggcgtggtggcacatgcctgtagttccagctactcaggaggctgaggcagaagaatcgcttgaacccgcagacagaggttgcagtgagccgagattgtgccactgcactccagcctgagccacagagcgagacttatcgcaaaaaaaaaaaaaaaaaaaaaaaaaaaaaaaatggccgggtgtggtggctcacgcctgtaatcccagtactttgggaggcccaggtgggcagatcacaaggtcaggagatcgagaccatcctggctaacgcggtgaaacccccccgtctctaccaaaaatacaaaaaattagccgggcgtggtggcgggcgcctgtagtcccagctactccggaggctgaggcaagagaatggcgtgaacctgggaggcggagcttgcagtgagccgagatcgtgcgccactgcattccagcctgggagacacagcgagactccgtctcaaaaaaaaaaaaaaaaaagaaagaaagaaagaaagaaagagggagagagagagaaagagaagaggaaagaaagaatgaaagaaagaaagagagagagagaggaagagaaggaaaaaaagagaagggctgggtgcaggggctaacgcctgtaatcccaacactttgggaggccgaggtgggcagatcacctgaggttgggagatcgagatctacctgaccaacacagagaaaccccgtctctacaaaaaatacaaaaaaattagccaggcgtggtggtgggtgcctgtaatcccaactactcaggaggctgagccaggagaatcgcttgaacccaggaggtggaggttgtggtgagcggagatctgccattgcactctagcctgggcaacaagagggaaactccgtctcaaaaaagaaaagaaaagaaaagagcacctgctaagtgacagacagtcttctaggtactttattggggtgggggaagcatctcttacttttctcatgacactatgacttcccattttacaagtgagaaaactgaggcatagagaagaaaagagatttcccagaggaaacagagagaaaagtggcagagctgggattcgaacccaggc[132 bp omitted]gcaacctccgcctcccaggtgcaagcaattctcctgcctca[131 bp omitted]gccttggcatcccaaagtgctgggattacaggtgggagccacctcgcccagcccacaaacatcactcttacacaaccatgagagttcagatggaggtttctagtttttattattattattactatttttgagatggagtctcactctgtcactcaggctggagtgcagtggcaatatctcggctcactgcagcctccgcctcctgggttcaagcgattctcccgcctcagcctcctgagtagctggaattacaggcgtgcgccaccacgccaggctaatttttgtatttttagtagagacagggtttcaccatgttagccagggtggtctcaaactcctgacctcaagtgatctgcctgccttggcctcccaaattgctgggattacaggcgtgagccaccacgtccagccttttttttttttttttcagatggagattttaaagataactcaaaccaaattaaattccagatggccccttcaacccttgcccccagcgaaataaactatacaaatattaggagaaaacacaggagttaaaaataaaaataatctgggccaggcgcggtggctcatgcctgtaatcccagcactttgggaggc[134 bp omitted]gaggcgggagaatcacttgaacccgggaggtggagctggcagtgagccgagaccacaccattgcactccagcctgtgtgacagagtgatactccgtctcaaaaaaatataaaaataaaattaatcttaactgtgttaaagcatattaaacccagaaacctttaattaaaagattaataactgactacaaatataaaattcctacacacatatgcacattaaaaaaatactagaagatcaaaaggcaacatcaaggaagaaagttttccaaaacacgacagacaaaagactgattttcttaatatgtaaagagcatctggaaatcaataaggattaacaagcaaattgaaaaaggggtgagagactgggcacagtggctcactcctgtaatctcagcactttgggaggccaaggtgggtggatcacctggggtcaggagatcgagaccagcctggccaacatggtgaaaccctgtctctactaaaaatacaaaaattagccaggtgtggtggtgggtgcctataattccagctacttgggaggctgaggcaggagaatggcttcaacccaggaggttgaagtacaatgcccagggtggagtacaatggcaactgtggagtacacagttgcagtgagccaagattgcaccactgcactccagcc[138 bp omitted]catggagaaaccctgtctctactaaaaattcaaaattagctgggtgtggtggtgcatgcctgtaatgccagctacttgggaggctgaggcaggagaatcatttgaacccaggaggcagtggttgcggtgagccaacatcgcaccattgcactccagcctgggcaacaagagggaaactccatctcaaaaaaaaaaagaaaaaagaaaaacaaaacaaacaaataaaaaatactagaagatgaagaggcaacatcaagggggaaaatcttccaaaacatgatagacaagagactgatatccttaatatgtaaaaagcatctagaaatcaatatggattaacaagccagtccaaaaaagggtgaaagacatgaatggatttttgttgttgttgttttgtttttgtttttgagcaaacagggtcttgctgtttcccacactggaatgcagtgacacaatcttggctcactgaaactgtgtaccacccctcccggctaattttcagtatttttagtagagacagggtttcgccatgttgcccaggctggtctcgaactcctgggattcaagcaatcctcccacctcagcctcccaaagtgctgggattacaagcataagccaccacacatgaacggttttctgaaaaggaaatacaaacgtcttctgggcataggcaagggagttcattctcgctcatggtaacctaaatataaaaaaaaactaccatgaaatatctttttcttcttttcatctgtctggctggtaaagatgaaaaagtctgagcatttgctgtgttttcagggttttgggaaaagagcagcctcatgctgctggggttcagagtgtgaaatggtgtaagctctctgacaatagctatttgaaaaaggtataagccagcagtgtcctttctgggaaggtatccgtgtgcacaaagagagatgataacataatacatgtgccaagaaatttacatgtaacacagcaaagtaggaggctggcatgatccctgacctccttgaacaaaggagggaaactgaggcccggagaggagtagtggcagaatgagaacccaggctgggctggtcactctccggggaaggtgggcgggctggcttaacctgaagaactaggtcaccatggccccagccacttccctattcaggctgaattccaggcctcgcccatcataattgctggtgtccaagaaggtcaaagggaggcctggggacactcggctttaacacggggaggccacgctgagccctgggagtgctaggtgccacttccagttaattctgactttctcattaagctgttaggaaaagctcggtggctgtgggcgaccggcccctgtgcctgggtctgtggattagagggatcatggtttttgcctcgagacactgtattatctgttgcgggcaattatggaagacccaggcagacagtgatgagctcagagaatccctgagctctggagtctggaggctcagaatcgtgggatcactgaacatgtagacacttaggatcttagaacagctggtgttcagtcctcctgaacaatgtggaatctcagagctctctagtgggtgggtgggggctctgagcggtaatcaccatacatcccctctggctgtcttaggggagaaaaagctgcagtagtaagttttaataaagttcagcaggaagca[133 bp omitted]aaggccctgactctacaatttttttttttttttttgagacggagtctcactctttcacgtaggctggagtgtcttttcacctaggcacgaactcagctcactgcaacctccacctcccaggttcaagcgattctcctgcctcctgagtagctgaggttagaggcatgcgccaccacgccaggctaatttttatatttttagtagacacggggtttcaccatgttagccaggctggtctcgaactcctgatcttaagtgatccgcctgcctcagtctcccaaagtgctgggattacaggtatgagccaccatgcccggccagaattttaaaattagctgggcgtggtggtgtgcgcccccgtagtcccagctactcaggagactgaggcaagtggatcacctgagaccaggagttggaggctgcagtgagctatgattgcaccactgcactccagcctgggcaacagagcaagaccctctctcgaaaaaaaaaaaaaaaaagaaagaaagaaatctcttctacattacaagaggcaaagtatctataattccagaatgtggcaatgctaagggcagtggatatgttacagatgggggcaagtgggcctggcacccaccctccttccctatttgcctacaggattggtggaatatgcagccccccccaacccacacttctccctgctgcccagcctctgatgaacaggcattctggcctatattattattattatttatttttatttatttatttatttttttgagacagagtcttgctctgttgcccaggctggagtacagtggcacgatcttggctcactgcaagctccgcctcccgggttcacgccattgtcctgcctc[202 bp omitted]ttttatcttattttactttatgaaacaggatcttactctgttgcccaggctggagtacagtggcatgaccatggctcactgcagcctcaacctcccaggctcaagcgatcctcccacctcagcctcctgagtagctgggactacaggcacacacctgtaatcccggttgtggtggcgggtgcctgtaatcccagctactctggaggctaaggcaggagaatcacttgaacctaggaggcgcaggttgcagtgagccaagattgtaccactgcactccagcctgggcgacaagagcaaaactccatctaaaggaaggaaggaagagaggggggaggaagggaggagaggaaggaaagaaggagggagggagaaaagaaaggaaggagggagggagggagggaaggaaggaaggaaggaaggaaggaaggaaggaaggaaggaaggaagggattgattgattcacacgcaggatgtttgttgggcaaatgaaggtttatggtggtccctattggcaagttgtgtttttctagcctcattctattagaaacaaaggctatctgccaccaacatgtttaaacaaagtagcattcctcatatataaagagttgttagaaatcaataaaaataaagcaacatgtgcaaagaacgtgcatacactttggacacacaaaagacataggtgggaaattgtaaaagacttgaaaaaagaatttcactgctgggcacggtggctcatgcctgtaatcccagcactttgggaggctgagacgggtggatcacctgaggtcgggagttcgagaccaacctgaccaatatggagaaaccctgtctctactaaaaatacaaaattagccgggcatggtggcgcatgcctgtaatcccacctactcgggaggctgaggcaagagaagtgcttgaacctgggaggtggaggttgcggtgagccgagattgtgccattgcactccagcctgggcaacaagagtgaactccgtctcaaaaaaaaaaaaagaatttcaccactctaatatttgacaaaaagatccaataatagtttttgtgaaggtacaaggcagtgagcacttgcatacattgctgggataagttagtaccaagtcccatctttctggagggcgaaatggcaaagtatattgaaagtctttgatggaaaataaccataatgactcacatttgttgagtgacaacctcatttattatcttttccccatcagaacagaaactccccaacggctattttgtctgttctattcaccgctgagttcccaatgtctgaaacaactcatgcccctgatttttatacccagcatgatcccgtctactcagttttctgaagtttgagaaccgctgagctgagctaaaaggaaagtttttatgcagacagacgtccaagcatccaatctatttaggcctttttgacaaccctcaagttcttagcagtgagtgaagaattctcaggggctccccactgacccataggttaatagatgtgcttgtagttattagaattaaatgaggtgatttttccttttttttttttttctttgagggaaggtctggctctgtgtcacccaggctggagcagagcggcgtgatctcagctcactgcaacctccgcctcctgggctcaagtgatcctcccacctcagcctcccgagtagctgggactataggtgcacaccatcccgcgtggctaattattgtattattattattattgttgttattgttattattattataattattattttgtagagacagggttttgccatgttgcccagactggtctcgaactcctgggctcaaaactaatctgcccaccttggcctctcaaagtgctgggattccaggcgtgagccatcacacccagcctgagataatttatcacattgagtctttagcatgctccaggagtgttcaaggttttataaacctcaactcacctcatagcaatgctatgagatagatgctaatatcaagcccattttttttaacacaaacaatcccatagtatttattgccatcttgtagtaacacaacggtaatcaaaacaatatgaataaatcttcacattggacaaaggacatctaaaaacaaactgtatccttctcaacaatttctcacttcattgatcatttctagttggagacactttgcagcagagtaatattacctccttttagcatgatccgacccagttgttttcttgactttgttttagaatgaatctcttctgcatcatctaatacaaggttcatatactcatcaaaaccaatgatacagccttctatccgcatattcacttgctcatagagccacacctgaatccgcgatctattttgtaagtatctgaagatgaggctgatgggctgcaccataaccttctgcactttctggccctggccacggtacgccatggtggaatttcacccattttttttttttttttataatttattttgttttgttttgttttttgagacagagtctcactctgttgcccaggctggagtgcagtggcgcgatctcggctcgctgcaggctccgcctcccgggttcaggccattctcctgcctcagccccccaagtagctgggactacaggcgcccgccaccacgcccagctatttttttttagcagagacggggtttcaccatgttagccaggatggtctcaatctcctgacctcgtgatctgcctgccttggcctcccagagtgctgagattacaggcgtgagctaccg[311 bp omitted]actgaatgcatagcatgaaggcagtacccgagccaaggcctggcacatagtaggtgcttagtttgagcaggatctaaatctcgtttggtcagacccacagacacacagctccatgaacagtcgctcctgtctctccaggggaccccaggaagcacttcataaatatttcagttcttgaattctttggtgactctatacagagccgccaggaaaggtgagcaggggcgggagaggcagctttccaaggggggcggagacatgaggcacacatcaagtcactcgccagcccggatacaccaaaatgtacacagcatgaggagaagtcagtcacacagagacacagacacacccaaggcaaatacagccatgatatgtagcaagagaaaaatgagacacgtagtcacatgcgcagagacacatgccccccagagcaaacacagacacacacggacacacgccccatgacaaacacagatgcacacagagagacacacggccttaagcctcacacacggagattcaccagatccacaccccaagacagaagcaggcacgtccactcctgagaccaatacaaactcactctaagagaagcacagacacaaccagggccttcgcctaccgggggccgggttgggaggctctggagaccctcgacccttgaggaagcccccattccagcctccacctgcgcctccagggcctcccacaaaggtggtgttgggcccgtgggggaaacgctgggcgggcagagagatgggggcttccgcggcaggaggggcccaaccgggtcggctgcgttgcagagcgtggctcttgggcgccacctagtgggcacatggagtagagggcccggctgccccaagtgcagatccacatctgtgcaggtcctgggttcatctgtttctgcttttgtctatttgcgtccctgtgtgtgtgcgtctgtttcactctgtgtctcagtctctgtctctcttctccctgaatctctctttttctgtgtctcggtgtctttatctctccatccctcttttttctccccttccctcccccacggcttcccccacctccagagcctgaggcttcgtcaataagcaagccaggcatctccagtgacccagcacaccccacttatagccgcatctcttgggtcccgtccctcaacggcgtcttggtccccatgagtgtccacctgctatgactcagccaggggctgagtgagtgggggtgtgatacccaacggactctcactctgtcgcccaggctggagtgcagtggtgcaacatcagctcactgcaacctccacctcccaggttcaagagattctcctgcctcagcctcccgagtagctgggattacaggcatgcgccaccatgccctgctaatttttgtatttctagtagagacaaggttttgccatgttgaccaggctgatctcgaactcctgacctcaggtgatccacccacctcagcctcccaaagtgctgggattacagacatgagccaccgtgcctggctaattatatctattttttaatacagagtctcgctctgttgcccagactggagtgcagtggtgtgatctcagctcactgtaacttccacctcccagattcaagtgattctcctgcctcagcctcccgagtagctgggattacaggcgtgcaccaccacacctggctaatttttgtgtttttagtagagatggagtttcaccatgttgaccaggctggtctcaagtgatctgcctgcctcggcctcccaaagtgcttggagtacaggtgtgaggcaccatgcccagctgtgcccaccagttctgccagcctgcttgctcctatgttctggtctttggagcagggatcccaaaactggaggcggcttgtggccccccctgctgtgtctttgtccaaacagagccagggccctgagtccagtgtggctcgcccctccttccccagggctggctggttctagcttcctggaggtgaaagtggtcatggcatggggagaccggggacacggggacagtgaggatttggatctcaagcaaggaaaggcctgaagagagacatttgagtgttaccctcaaacccttcgaggagggctggctctcttcttctcaagaagaagaaaccctacaggctggtggtcccatccctgatcagccactgcggccccaggtccccatgttcctgcctgctctgttgctcaaaggtgctaggccaggtgcatggctcatgcctggagtcccagctgctcaggaggctggggcatgaggattacttccaggagctcaaggttgcagtgagctatgatcgcgccgttgtactccagcctgggcaacagagcaagatcccatcgctccgaaaaacaaaaaaaagggtgggaggcgtgtcctttccttcctgggggcttctgcacaccctgtttcttcttctggaaagcccttctggggctccttcactcctcatggcttaggtctgtccagtcccctcctccaagaagccagtctcattccacccccagacaacaggaacctgcaggcttgtctcagtcatggctgcatctctgccatggagccctgctcgcagtaagtacccaagaagcatttgctaagctaaataagcaagaaaacaaaggactcagagcccagctcttgagcctggatttcatcttgacttgcttggcagggggccttggccaagtgggtttccttcctgctctgtgcactgtttccccagcaatggggacctttcccggaccacctgtgagatccaccctgctgggtttcatttcagctgagtctgtaaatatttggtctgctgtggccggcagcatacacgcaggggaagcttcagtgccttttacgagctccccgcgaggcctgatatgcgttttctgtggctgggtacacggggcaccccagtagtttcacagctcgttggcacgaggtggctatgattccaagactggaagaagccgagagacaccatcagtggcttccagcacttaactccacagcgtgcagcatttgagaggccaaagaggggcctcttgttttaaaaactgtaatgcaacattatagattacagctgcagtagaaatcgagcccagcgattccccttccctaagtctatgggccacacttaatttcttaaagggcagaggggagggatttctgttgggcaaggagtgggaagccctggtttagacctgtctcttgctaaaaaaattcaaagaaccacaaccacttgctatgcacctactgtatgccagatattgcataaagcacttttttatttttttgagatggagtctcattctgtctcccaggctggagtgcagtggtgcgatcttgactcactgcaacctccgcctcccaggttcaagcgattctcctgcctcagcctccttagtagctgggattacaggcatgcgccaccatgcccagctaattttcatatttttagtagagatggggtttcaccatgttggccaggctggtctcgaactcctgacctcaggtgatctgcccacctcaccctcccaaagtgcggggactactggcgtgagctaccgtgcccggccaaaacctgctttttttttttttttttatggagtctcgctctgtcacacaggctggagtgcagtggtgcgacctcagctcactgcaccctccatctctgtgttcaggcgattctcctgtctcagtctcctgagtagctgggactacaggtgcctaccaccacacccggctaatttttgtgtttttagtacagacggggtttcaccatgttggccaggctggtctcaaactcctgagctcaggtgatccacccgcctcaccctcccaaagtgctgggattacaggcatgagccaccgcgcccggccaaaacctgtattttaaaaggctgtgcactggggagatgcagatgcctgccccaacgatgcttatgtggtggagagtgccgacaataaacaatgctttagcgagtggtcagagccacgaggacaggcaggtgtgacaaggcagagggtgatgaggcgctgctgatccagtggtcagaggagacctcttgcagggggcagaatttgaaggggctgggcatgtgtggctggtctcctcagtcacagccagtgccacgctgttcttttttgagacagccctgtcgcccaggctggagtgcagtggtgtgatcacagctcactgcagcctctgcctcctgagcccaagtgatcctccctcctcagcctcgtgggtagctgggactacaggtgtacaccagcagcccagccaattttatttttttgtacagatggggtcttgctacattacccacactgctctcaaactcctgggctccagtgatcctcccacctcagcctcccaaagtgctgggattacaggcatgagccaccgggccctggttcacagaccacccaggaagctctcccaggagggcaatgtctcgggtcctcagtaccttatgctccactgaacccggcagctgctgtgtcaatatttgcaggtggaggcaaacacagggcagctgcatctcacgaggatttgaggagtacggagaagcggctcttggtgctcccgggagtaatttaggggcagtttctggcccagtattgctgtctctggaagcactgtaggacatgtagagttatccttggggtcaactctaaaggccaagcgcatgtgcaaaattatgtacacactcacgtacgcagcttgctcactggtgccccaaacacctatcccttcaccaccgtgtgaccgcggcacggggtgccctgacaaccggggaggctgaggagaagggacctcgggctgcagcctcagctccatggctcgctacctctgggcgggtctcagcctccctcgggctcagaaccttcttctgcgcttgactttcccaggaattgactccagtttcccagggagctgcactgggctatgtctgggtttggtgatgttgtgtggcgtccgtaggtgtcctcatataaattggtggctggccagggggactagagatgtctaacttgcttgactggtaagcacatcaggtgcttcccaaagtggattctgttgtacaccagggtgacggacaaggatgcccacgtcctaatccctgggacctatgaacacattggtctccaagacaaagggaccttgcagatgtgattaaggtgaaggaattcgtggctgggtgtggtggctcatgcctgtcatcccagcactttgggaagccaaggcaggagaatcacccgaggccacgagtttgagaccagcttggccaacatggggaaaccccatctctactaaaaatacaaaaactagccaggcatggtggcaggtacctgtaatcccagctacttgggaggctgaagcaggagaatcgcttgaacccgggaagcggaggttgcagtgagccaagattgtgccactgcactccagcctgggcaacacggcacggcttcatctcaaaaaacaaagagaaaagctctcctagtccacccagctgaccaaagaaatggctgaagggctgaggtctgaacccacccagcagtgagagcagaatccgaaccctgatttgtcaccatcgtatgaccaggtaggaacagcctcacctctcccgtgggtcactgggactcaaggaagccctgcccctcaatccggcaaacctgttaaaaggcacggcatccccgttaaacgtcgactttatggttgttgggtttttttggaatcaaaaggccctgttctaactttgcctttgaaattatgtgactaggagtcatgcatgcaatttgagactggcaatcatcgtggaggcttgggagttccttgggaataagaaaatctaacctaggagctgttttgaaatgtaatgaaatctttatgaatacaaaatttagcaattggtgaagttgacacattttgtagctgtggagacatttcgtaaggtcttaattctactttttctttcttttttttttttttttgagatggagtttcgctctttcacccgggactagagtgaagtggcgcgatctcggctcactgcaacctccgccccccagggttcaagaagtctcctgcctcagcctctcgagtagctgggattacaggcacccaccaccatgcctggctaatatttgtatttttagtagaaatgggggtttccccatgttggccaggctggtctcgaactcctgaccacaggtgacctacccgcctcagcctccagaagtgctgggattcgaggcatgagccaccgcgccaggccataaggtcttaattctgattctgctgttttctttctgtatggctggagctggtcatttcctcaccgggaccccctccagacctctggcattgcatttcgccagggcccctgtgaaacatgagcacccgaggctctattcctgtagggctccccagggcctgccaacatgtattaagcatttactgtatgccaagctttttatgtggattaactaatctttgtaaagatcccatatggcaactacaatgattactccctccttccagttaaagcagctaaagcagacagtaatgacctgcccgtgggcaggcaggtagtgagaaggctgggtgccaggcagttggctcctaaacttgctctcaagaagctccctgtttctgccccagtggctctcattcccgtgatgcccccacagctccccctcccctttaaaaatgtctttaaaacgatgggaaatgatacataacaaaattcaccaccaaatggtataccaaggccaggcatggtggctcatgcctgtagacctagcaacttgggaggccaaggtgggaggatggcttgagctctggagttcgaggctgcagtgagctatgatcgcgccactgcattccagcctgggagacacagcgagaccctgtctcgtaaaaaaggggaattggaatcttcatatagtgctagtaggaatgtataatggtaccaccactgtggaaaagtctggctatacttccagaaataaaacacagggagttacaaagtcagcataggacccagcaatcccagtcccaggtatatacacaggagaatggaaaacaggtgttcaaacacatacatatccataaatgctcacggcagcgtgattcacacacaactgcccaaaggggggaaccacccacacgtccatcagcatctccttttcataacacgtattttgttccacccaccttttctctcttgaaataaaagt[144 bp omitted]tggaaccccgtctctactaaaaatacaaaaattagctgggcgtggtggcaggcacctgtaatcccagctacttgggaggctgaggcaggagaatcgtttgaacctgggaagcggaggctgcagtgagcccagatcctcgccactgcactccagcagtgacagagtgagactgtctccaaaaaaaaaaaaaaaaaaaaaggaggggggggggaaccaggacacaaacacgcttgcaggaagaaggccacatgatgaggatggaggccgagactgggcaatgtttttacaaaccaaggaatgcccagaggtgctcggcagctgtcagaagccaggaggctcaggacggagcctgggaaggacacagccctgcccacacccagatctcagactcctggcctcaagaactgagagccaatgagcttccttaggcagtctatggtgctttgtgacagccgtcctggtaactcgagtgctttgtttctgcgtggaacagagctggttccaggcccggctcgttggaaagggcagggctcttctgcccccataggatgtccagtgggactggttccctttccagctcccatagagcagcctggcagtggttgagcccctgcttcatagttcaggaggccacacccacctccaggaaggggtgctccgtgacatctgagacaccgaggtctgaaaacagggcctgctcccaatcccaggctgcctcctcaacgcaggctaagcctgccttttattgcccaacagggaagctctcaaccccaatttctagactctggctcgtcggggagacaggcaagccgcgaagaccccatgtgcaacacagaggcggcgtggcgcccagtccacctgccactggaaaatgactccagaagccgccaccgtgggggaggctccggaatgcgttcacggcagctcaggcccagacaggacgccgagggccagggccaacctgcctttcatgctctggtgtctgtggcaagctgggctggattttaacatggctttttaaaaacttaacttcccagcgggggcggggggaactccagcagaaccggcagttggaggaggggcctgcgggtggctgtcctagatacggaggggaggaaaagaggtccccagcaggtggccctgccagttaactctcaccacaccacaccgggctgggctgcccctcccgccgagagggcactaggccaaccccatgcaccatcctctgccccaagatgcctgcagcccctacccctggccagcaccagctccgctcatgcaccagcagttctgaacagaacagctgtgcctcacagtggccggcccctggagggccctggcacggagggctgcgcgcatgggccggcagcctgcgggctaccccggccagcgaagtgcctcatctggcacagtctttaaggaagaaaatgggcatcacactcaaatgcacttttgcagacaaatggacatttccagaagaacggagggaccagttctaccacgtgggcccatcaccgagtcagcgccatcccactcctaaccagctgctggcagcagacactgagcaggacacacttggcagccaggggaggggcgggcccaccacacacggaccctccctgacagagcccaccacacaccagcatgggacacagccccagactgaggtggcagggggagggctccccagggcctggcacgccctcaccactacccacgcagagacaggctcggggtaaagggattggtctgagggccctatggtgcacagcaccccctgaagaattcctagttcccatgggctgactccccagcctcagtttcatcccatgatgggaacccggacagcccacttcctgaggtggttatgacaactcagcaggatgatgcaggcaaaagactttggcagcacctggcagagccaacagtcaccatgtggtcacaccactgcgcccagggttggtcccatcccgagctctacggccaccaggactcacgcatgtgcacgcgcacgcaagactgcgaatggtaaactttattaatggaaaatggaatgcctcgttaacagaaaccttgatttaaaaatggcagaacaagaacacatttatttaaaaaaaaaaaaaaagtgagttcacattgtattgagctacaacatggtggcaggatttactttgcttttaaaaagatcccccaagttcgagggaaccctggctaccagattcaacagtgcgtctgcccacccgaaaactcgcagcgagtgggacttagtagcggcgggtgaagtgggggtacggggggggatgagggtgtgggtgagggactctgctgccccggtcctggctggccactccgccaccttccagtccgccacctggcaccacgtggccctgggaatgtccaccttgtgcaaagccgcctcgcctaggaacaaagtcagacaatttttttccccttgaagtgctcagcgttttcatcgtaacatgggttcagtaacggtcccgcagcctttagagcgcttgggttttttttccaggtgagaaaaatcatcatcgcacattgtattccaggtaactcaagagcgttatttgcataaattgcaaagagctgctttttgctttgttttcataacatccaacccagccagctgatcaaacatgcaaaaaagggagaggaagtgaggagcaggagtgaaccaccgtcctccacggacgacacaccttaccccgccactccaccgcggcttgccatgtgccccggccccgagggcccagacaggcccctctcgccacctagaagagaagaagggtctgcaaacactccgttcctggggaagcccctggacacatgtgggggccacagccaccctcgtccctggagccagccccgtaccttgccacctggcgtgctcccggctagccgcgcctgcgtccatggcaccctgccaggcgcgtgcctggtgctcctctagccgctggttgtgctctccccagtcacggccacccctttgccaaaagaaaaagacatgcagccatctaatgagcctccagggttgtgtcggcagcaggcgcacccaccctgacctcagctgcatggtgggtcatgccacacaacaagggctgcatgtcaagtgggcaaatcaagggaagggacatttccccaaagacagatgtgctagtaagcacgtgagaaggtgctcaacgccacccagaaatgccaatccgagccacaccgagatgctacctccccctggctgggatgctagaatcacacaataacacacaccgtggagggtgcgaggaaagggaagaacccttgtccactgctggtggaaatgtaaaatggtgtggccactgtggaaaagtttggtggttcttcaaaaagttaagcgcagaattaccatgacccagcaaacccattcctacctgccagaaatgaaaacatggccaaagacatctgtgcatgaatgttcctagcggcaggattcctaacagccaaagggagaaggaccccaacacccatgaactgatgagcagataacactatgtagtgtgtctggaccatggaatgttcagccctaactaggaaggaagcgctggcccaggcagcatgtggagatgagccctgaatacccaaggcttagggagaagccaggcccagcaggcacaccgcgcaggccaagaaatgactcaagacggcaaatccagagccagaaagggacctgtggctaccaagggcaggggggagggtgcagctgctaaaaggggcagggtttcttttgacgtgatgaaaatgcttcagaatcagccgtggggatggctaaacagatccacgtacacgcaaacctccactgactgcacacgtgaaacgggaagtgtgtgtcgtgtgaactatacttaaagaaagctatttgtttaaagtttcagacaaactctgggagatgaaaatccgagtccagtgtcctgagtcccaagtggccaagcagtcacagtggccgtgcaggaaagcagccagacccatctgcacgagtgcctgcctgctgtgggttgccggatgcagtgacagtcaggccaagtgagccagcccacaggcccgagaggggccaccagagcccccagcgcgcactgccaggcaagtgcaataccgccctggagggagcggaaagctcccgtgtggaacctgccctcggtgacccgatggcgcccagccgctgctcaccatgggtgagtttcccgtttacactcccgaggtatttaccataacacccagcaagcgacaggacaggaatgctaatgaagtctcacaggagagaacacttcacaccaactgatcagagcactgccaccgtctgtgctgcccagagattcaggagaagcttcgggtgtcctgggacactcggcacagcaccgagtcaaagtccctggcagagctggaagtgcctctcagcgcggagggagggatggaacgggggagcacagggggccaaaacccaccctgtggcgctgggcagggtccgaggcagccctgggccagggctggagacaagacaggacactcggctcacagaggaaagcagggcagcagccgcaaagcagtcctgccaccagcctcctcacggccagcccagacggcaacaggacaaacaggcaggggtgactgcagctggccaaagaaactagagaggcacccagagtcctcccagacaagccctgccccccaccaatgctgacaaggctcagaacagcacccccactgcagtgctggtgaaggtggctttggacacctgtggaggacctggcccagtgtcctcagccctgagtcctgggtggagggtcctcctaagtgattctaataggcaggatagggttgagaagatccaccccagaccaactgggggtcagagaaaaaacccgaggaagacacgtgtcaagaggcaacgtggaggcaggggcgaggctgctctaccacggacggggcaggactaagagcttcagcgctgtctctcccagtgtgtacgcagcccatgatcgagacattcacaactgcaggcgacccccagctcaagaatggggatgggccattctgggcgacctggacagctccatccctgaaagcctgttctatgctttcttcttgagaacctggactttctgagtcaggggtttcaaatggcaggacccctggtagcccatcctaaagctcccctagctgaatcaaaccttggggacgtgcctggccaggcaccaaccttttcccaggttaggacagatgctccccacccggctggggctcacccactaacctggggggagggggcagcccccggccttcactcagcctcttgtcggagccgtagcccccccagccatcacgggagtcccggccgtggcgctctgggggtcctccgtggccatggcggtcatctccatagtgctggaaggcaggagaggaacagggtgacactgaccatgtcacccacataggcccaccttccggaaggcctgtccactgcaggccccagggtggcaggtggggcggagctgagagaggactgaagggtgcagtctcagccctgctgggccctgcttcactgaccctctgctccctggctcccctcctcgcacccctacagctgcatcactgccccacctgagctgccccaggagccagggcaccctggcattactgccctcaacagctctgctcaagatccactaagacgtcaccaaaccctgtcttccctgagaagttgggcgccgcctcctttccgataacaggagggccctcgggtgggtcagcccccctgtgctctggcagggccacaattccggcctccctggccaaccaactctgcacggagcagccagcagccaggaagcaggcgggtgctgcctgctgttacaggccattactctgccgcccacctcccacctctccaccaggctgctgctttctcagaactcacaccctgccaccacgcacggggcacccgcatggcaccacagagactcagggaccattcttgtggtcttcagccccccgtgcccaccaagcacggacttgaaacatggggaagcccgggctcccccatccccccgaccctggcacatgtgggctaaacgacaaccaccatttgggttcttgggggaccccacaggcactaagacccaaaggctccctgagcaagtggacaatgaagagacacatgaggtttctaccggatacaatgaagaacaagcccaacatatttgaaaatgacagaaacttgagcattacaaaacaatcaaatatttgcgctttttttttttttttttttttttgagacggagtcttgctcttgttgcccaggctggagtgcaatggtgcgacctcgactcactgcaacctccgcctcccgggttcaagcgattctcctgcctcagcctcccgagtagctgggactacaggcactcgccaccatgcctggctaattttttgtatttttagtagagacagggtttcaccatgtcggccaggctggtcttgaactcctgaccttgtgatccacccacctcagcttcccaaagtgctgggattacaggcatgagccaccacgtccgactaaatatttgtacttctagtcgctggccagaacccacacttgcatacccgccacacgtgctgacttggttgccacctctctgggatcaagcggccgcctggctagaaatggtccgctatgcctgcacagcagtacagtggccccagggcttggcatcggggctctactcacctgcccatcccggtggtctcccatcattggcctcgaaccctcccgcctgcaaaaggaaaagatcccgttcaaacagcaccaggcacgactacacatttctgcaggtcaggcaagtttcgcgactgggatactttttccatcccatcacataaaaactataactggcctgggaaaaaaggaaaaagctagctcaaatcgaaaggcttttccccgggggcagaaacgaagttggatcctaaagaggtaggaataaagatctcactgaactaaaattcctcggggagctctcagttaggggaacagggacaaacagaggcctccaatgatccctcatctttggtctgacccaatgcgtgggactcatcaaaattcacaccaactccaccccaaactccagcagaattaagagtgtggcctctcagcctccctttcctgttctccccgctctgacattccgactgaaggagccaatgaatggggaaatgggtcagagatgtgcagccgaggggagcccaaagacaggattcttacactggaaaaccaagggctgcctttttaataaactagatgtattcctcattttaaaaggctaaaaaacccacccagaccctcgaaatacaaaacaggcctcatgagaaattttgcacgtcctccatcaattctctggtagctcttgggcacaaccaggttgtgctgacaaacactgctgcctcacaagagagctcagtgtagatggcctgcactcaggcccctcctggcccacctatgaaaagagtcggtggatggaatgagctctgagatgccttcctctgaggtaagctggggattccagcaactcgctcaagttctgtgcaaggccagagtcatccactgtggatctcagaagtaaacgaggcttcagagcacacaggaacccctgcactgggctgagaacgaggtcagctggatgccccggtgcccacaatgactgtagctaaaggaggggacaagaccactgacctgtcgatggcgtggtcctggtactggccccggtctcgatgatcgaagtcgtgaaagcggtggtctggccggggaaagtctgcacgatatcggtcctccattgccacacgctttccttctggccaataggcatcatctcgtctgttggtttttattttaaaagaatacaaattccattaatgagagaggaggaggaaaaaaggaggaggtggaggtggggaggggagctctctccccagacccagtatcgtttaaaatgtcctgcagggctaatctctaaacattcgatcatcattgctttgatctgataaattaaaaccgccattaacagccgagaggcacacttgtgttctcatccaacagtcccaaaaggagcactgctgtgagctcattgtctcgtgaggctgttattaccttgatcccccctcatgagcaactgaaaagaaatatttgattcttctggaatagcattcgagttgccacacttttactttccctgccttccacgggagcctgaatctccctctgagtttcttgcaaaagcaaagagaattagatggggtgatagtgaactacacacagctctggacggcatccaattatcttcttcctgatttttaccagaaaactaggctcacggagagcggggtgaagggtgactgtcaattaagccgcctggggtagctagagaccaataaacctactttctaaatcagaggcaatttccttttccacagcgcctgctctgcctctctgtctacaaggacacatgagaccggcagagtcagcggtggccaacttgggcctaacgggcgttcggttgtctcgcaagacagagaacagctatgctccacgggtaagtggagaggaaaagcatcacaaacccttcagcaagtggcagccatcaagtttcccagaataactcaagttcaggaagatgctacacagcctccggtgaggacagcgaactaataaacctgcagcagcgcagtgagatcggcggggggtccccaaggcgcatgctccatatcaaatttcattctccccaccgacagggacggaagggaagccgctgttctgctggaagggtgaacaccgctgccacgctggtctccgtcctgcccacgctctgggcgggactcaccggtccaggtcgtagggcctccgcccgggccgccgctcctgctcgtaacgcagctgctcctgctggcgccgcagctcctcgcgctcgcggtggatgcgctcctgctccttcctgcgctcacgctccacgcgcatgcgctcgcgctccagccgctcccgctccatgcgctcccgctccagccgctggcgctggcactcgagctgcaggcgttcccgctgtagccgggccttctccttccgctcatggaaggcctcgaggcgttgctcccgctcccgctgctcgcgctccctgcggggacaggtgaggctgccctgaactccctgcgtgagcctccaaggagaaagcccggtgcccaaaactgggtgtgtattggaagcagaaaaaaaaaatggatccaaaagctcaccgggcttccctaaagctgcgcgtgcagggggttaccttacttaacaaagctaccttaagaaaagcaaaggcagcacagctggcaacatttctaggtttgctcgagaacattttccaaatgctgtgagcacagcttttgctttactgagcaatatttgaggaaaagtgacaagagaacgccgggcatcccgacatgaaaaggccgaatgtcaaggcagagggacaagcctccttcaagaccacagcccagaagggagccgcggcaaaatgacaactggactctgcttgcagtttctgaccttaggtgaaaggtttcaacagggaagacaggcctcagcacccaggcaccatcccatcccatcaaagccacacacggctgggccttccacacgggccaaggtccaacatcagaggaggggcgaaaatagactttgagccagcagaaggctcagcctgtaatccagcacttagggaggctgacgcaggaggatcgcttgggcccagcagttatcagcctggcaacatagccaaaccccatatactgtaaagggctttgatgacttctttttaagagacagggtctcactctgtcacccagtctgcagtgcactgttgtgatcacagctcactgcagccttgagcttctgggctccagcaatcctcccacctcaacctcctgagtagctgggactacaagtgcacgccaccatgcccagctaatttttaaatattttgtagaggtggggtctcgctacattgcctaggatggtcttgaactcctggcttcaggggatcctctggccctggcatcccaaagtgctcggattacaggtgtgagccactgcacctggccctttgatgactttcatgccacctggcatgtctggcggctcacgtgtgaacaggtgctggcccctgcctcgaggacccaggttaagcacgacacccgccagcccaggcactggctctcgggcacacagactgcgcactccaagtacagctgggagaaggacagccaccccgagaggaaaccaccagcccacagcctcacccagctccactcaccgccgcctctccgtttcgcggatctcccgttcccgctgcctctggcgctctctctccctttgttctttgattttatcaaacgacaagatgtctctcttttctttgctttctgacttgcgatcctgactcttggagctctgtttaccaaaactggtttattaatgtcaggaaaatgattgcaacaaacaaacaatggagattatgcacgtgtgcatgagactaagattctctggccccacatggtgtagatggaaggctgtggtctccagaccagaggcccaggcataggctgcttccctccaagtttgcattttactgcctaatccagaatcctgctttcagatgtcaaggggcattcatggaagagaagaggttggcccacgcctcagaaaacctacaggcacagttcttctagcatagcacagccaaggactcacataatccaaagcaaacctaggcctctcagagccacgggcacatccgcacagggccactgtggccattagttcagaggggacagcagtcaggccagctgtttggacagctggagggcagactacatgtttcacatctcaactgctggctcaggactcaggcagacagctctaaatagaatatgccaggccgggcgcagtggctcacacctgtaatcccagcatttcaggaggccaaggtgggcggatcacaacatcaggagttcgagaccagcctgaccaacatggtgaaaccccgtctcaactaaaaatacaaaaattagctaggcgtggtggcgcatgcctgtaatcccagctacttaagaggctgaagcagaagaatcgcttgaacctgggaagcagaggtggcagtgagctgagattgcgccactgtactccagcctgggtgacagagcgggactccgtctcaaataaataaagagaatatgccaaaatgctttaatgcaaaacagtgctcctaataaggtacagaacactaatagccaacttccgtaatttattttttgtaggttttttgggtttgagacccagtcttgttctgttgtccagcctggagtacagtggctcagtcacagctcactgcaggatcaagtgatcctcccacctcagcctcctcagtagctgagaccacaggtgcacaccaccatgcctgactaatttttctatttttgtagagacagggtttcgccctattgtccaggctggtctcaaactcctgagctcaagtgatctgctgcttcatcctcccaaagtgccgggattacaggtgtgagccaccgcacccagcctacattcatcattttctatctgtggcataaagctcagagctgtaacaactgactcccatttccaaggttctccagggcccctcacccaaactggctacacatcagaccctcccaggaagcttttaaacaacacagaacctgaggcctcctgctgatccacacagaatctctggggcaggggcctgggaaatgacatttttaaaaagctactcagtttatttccctaattagcccccataggagagaaagagcgagcaatgaaaaacaaaccaacccaacagaaagacaggcaaaggtcaagatgagacattacaccaattattaataaaatgcaggctggggagaaaggggcacacagacacaggagagacacacatcacccagcactttgatggcaagctttgcctacgagacgggcagatgtcttacacacactgcagtagaataaggtgacagatgcccacataccaccgcacagtgggcagcacagcaggcaacagtgtcagcacgggactcctgggttctcaggccagcttagccacttactagcgacctggcaggtgcaacacacccaggagatttaagtcccctccacaacctttctgaacagcactttatttcaaaatttaaacgttaaaagaggctgggagtggtggcgcacacctctaatccagcaagtttggaagatcaaggcgagagaatcacttgaagccaggctaagcaacaaagtgagacactcccaccctttattttttttaataggtaaatatcatgcataaaataaaaaatatatgtaaaagcgaaaagaaaaaaaagcaaaaaggaaaaaagccaaaccgtatgtgtctgtatgtagagacctccaaggcatattacacagaaagtgcaagctccagcacatcctctgtctgtggtcccatggcaggcacaggggacgtgtgtgcagaggaagccgaggagcccaactggacacacggaggctttagtatgcccgtgctgcatctcctcaagctgaccagatgttctaatcatgcatgtgtcatcactacttgttttcaacatcacagttacatgggggtaagagtatgggtctttttcaatgttctactctacatttctctgtatcttatgattttcatgtgaaaaatgacattaggaactgatactttataaaatccaaatgttcattttaaaaactaagtcttggttgggcacggtggctcaagcctgtaatcccagcactttgggaggctgaggcgggtggatcacttgaggtcaggagttcgagaccagcctggccaacgtggcaaaatcccgtctctactaaaagtaaaaaaattagcctggtgtggtgatgtgtgcctgttgcctgtaatcccagctactcgagaggctgaggcaggagtcgcttgaacccaggaggcagtggttgcagtgagcagagatcacgccactgcactccagcctgagtgacacagcaagactccatctcaaaaaaaaaaaaaaaaaaaagttaagtcttaacaacacaaagtggtcctggctgaatatggtgaactccacattcgttaaaaaagtactgtcacctcatgaatatcttagctagaacctgcagctgggaagcagaggtttttattgtttcccagagtgaaaaacgcaaatgagacgctatttcgtctagttgtgtgcacaactcgagaggtacagctcttgatctgataacatgaccagctctctgtcctaggttggtctctacctttttggttaatttaataggagactaaaaaaccaatggaagaaagtagcctgctattaagtcaaccaaagagtaggacctgccttccggctcgaaaagcctgggtctggcccatcccaccctatggtgagctgccgtgtgaaccaatgctctgtctgaaggcggcacatcccggtcaggagccagtaagggaagcaaacacggatgggcactgctctgcagaaagcaccaggattcatgtgtgtgtctgtatccgcaatctacacaattatcgcgcctcctacaaacttcaattttaaaggcaaaacagtgctgttttcataatgcggatcaaacgggccgtggagccatcgtgagaaacagctggccctgagatggcagaggcaatactcactctctctttggacctgcttgtggttttcacgctaatgacgggctctcctttcgatttatccatcacgaccgtccgctccattcctctgcttccttcaggaaaaaacacaacaaactatcaaaacctgtggacgccccaacttcccgcagtaaacagcactctgatggaccctgggcttttgaacacacaaggcgtgagtcaagtgactgacactagccttgggagcctctaattctcatctattgtgagcaacacggtaacacgggcacagcatcatgggggtaccctcacagctctttacacaactagagggacctgttcccaacctacagcttaaacctgcagcacgcacacaagcacggccatcctgcagagccctccgtgaccctccactctaaacccacacagctccggagctggtctatgctgtcactcctccctgacattctgtgaagctccgcagtatccagcctgtgctaggaatcacactgccactctgagggagtgccttgccagacgggtgggcttccctccattcatctccagcaataaaggcttccaaaccaattatctctcctgacgacagaaccaccaggcataaaccactggaacaatgacttatttggggagatttataatacttgaggaacattttaaaaacacgttcctcgtgagactcagggtaaattagcccgagagctgaagatccagcttgtaatgtgctgtaccaaatttcaatgctccagatggttgggttttgtctctgtttttctcttccttgatgggggaggtggagttggcttatttttttttgccactaaacattctgagtctcatacagattcaaaggtgtaaagcacaatgaacctttataaaatgacaacagaagtggcatcgtccaaacagaaccacttcaacagatgcttggaggtttcatttttctctgtgtttttactacctccagctttaacataatgtgggaaaactttactgcacacctgcaaaatagcatcaggttagttacaagaaactcggacaactcactcttgcaaatcccacactacaatcagccaaaggccctgaaaaagcccaaactcaggcagctgagttcagcaatacacataagccctgagtcccaggcacttctggattcccgatgttgtatggacactcctttaagccatttcatcaacagactcttgtttctttaacactgccatatgaacagcgaaacagccatgtcaccagagcttgctgtcctcaccttccctcggaacccccactccccacccgtgccaggccttccccttccacagctcttaaaaggctctcctcacctgatttggtgactctagaccgatttgtaggtccgggtttcagctcatcctggtctttttcttccttcttaatgtcttcaggctttttttcctccttcttctcaatcttctcttccttcttaattacagttctatttaaagacatggttatcaaatttgagttcacaagactctgtaacaggaacggctcacccagagcctcgactcacacatactcagacgtccacacaaaacaaatcaccccggcagcaattaggtgggaaaaattatttggaacccatagtaataacaatactcctctttagatacaggctgtattcccacttctagtatgtgctgaattgagggatatgcacaatgaaattcctggggatgcgtttccaaaatgtcagacaggctagcacgcaagagtggtgtgcaggtggacatgagaaacacgccaactacataagaacacttctaaaaagtttaatgtttcatcatgtatgtgtggaacattgtttataagctttatagggaaaagcatttcttcccaatacagcctcaacgggatggaggcacagtggcaggacaccaagcccccactgcacagagcggcaggccatttacccgtgaggccaacacccctcgaccggtaactgctgcatacttttagggagttaaaataatgtgttatgtgccagtgaatacgggaaggtgttaagtgccatttcaaccaaaggcaactttcttctaagcagtgaaataaatcatcttcgccactcaaactcagctgctgcgttccctaatgccatttgtctcaggcaattaaactgcacaccgactcaacaccaacgacatgccagggtccaggcaggaaagtcaggcccctgcaaggccctccagcaagcacctgttggcctctcctccaaccgacccaggcagggttcccggcagagctccagccatgccagggaagcctctctgattgccccgtctcctctgcccttctcaacctccacatcatggagttgtctttaaaaaaaatatatatataccattttgagaaaaattttaaatacacaccatagtaattaatggtacatcccagaactgactattgtaaatcatctcatctcctctccctcatccctgcgacaaccaccagggtggccttagtgtcaatcactgggtctgcctgaccgcagtaatctacagtgacattttgtaagaatgtcttaggagtgacacgaacgaggccatacttcatacactgcttacttttgtcacctcatggtatgctttaaagaagggtttttaggctggtcgcggtggctcatgcctgtaatcccagcactttgggagaccaaggtaggcggatcacaaggtcaggagttcgagaccaccctggccaacattgtgaaactccgtctctactaaaaatacaaaaaaatttagccaggcgtggtggcgcatgcctgtaatcccagccactcgggaggctaaggcaggagaattgcttgaacccaggaggtggaggttgcagtcagccgagatggcgccactgcactccagcctggcaacagagagagactccatctcaaaataaataaataaataaataaataaataaataagaaggacctttagatcctgagacagaacttagggggaataaaaagggtctgactcctttcacctgctgcacaaaattctgtgtttattcatctgctttccttccagtagataaatatatatgctggaaaaaagactggaaggatatccaacaaaaagcatcatccctaggtgttgggattacccctgacatttacatgtgctttctgtataacaactgtataaaaaccaccactcatccaagatggcaaaggctagcccctcttcttcccctctttggaaagcttctctatttcacaaggccaaccactaatctagaaatccttcaaatggaagggaaggctaatgaaggtgttaatttgaagaaaaaaataaggtcaaaacaaatttttaaatgctcaacctcctaggcaaacaacctgcatgcagtttggtcttaaagatcttaagttcgccgggcgcgatggctcacacctgtaatcccagcactttgggaggctgaggtgggtggatcacgaggtcaggagatcaagaccatcctggctaacacagtgaaaccccgtctcaactaaaaaatacaaaaaaaattagccgggcgtggtggtaggcgcctatagtcccagctactcgggaggctgaggcaggagaatggcgtgaacccggga[146 bp omitted]cataggttgaatcccagccttgccgtttcccagcaaactcaggcagggcgcgctcccctctctaggcctgtatcctctcctacatagagcaagtgcctcacagggctactacaaggaccaaggaaactgctgcattcccagtgctggccacaggaccacaccatactgttagctaattattaccgcctttcccacaaatacagaaaaacaattaatgaaacacgcaagataccaagaacaccgcaaacctgcaacaacagttccccatcttccaccaatacagacatttttttcttagcaatgctgatgggatgtgtctttttgaagttgctgattaaattagagggctcaccgccccccccacccccctcctccaagttcatgaaggctcatctgacactcattactcaggggcctactgatttcaatctggggccaggtgcagtggctcacacctataatcccagtcttttgtggggccaaggtgggaaaattgcttgaggccagggtggaaaccaacctgagcaaaagagcaagaccctgtctctatcaaaaatttaaaaattacctgggagtggtagcccacacctgtagccccagctactagggaggctgaggtgggaggttcacttgggcttgggaagtcgaggctgtaatgagccatgactgcatcaatgcactccagcctgggtgacccgtctcaaaaagtaaaatgttttttaaaaataataattccaattaaaaataataattccaatttggccatgatgtaaattggtaattacatcttcaaaaacccagttcaactatgtccacagacatgtttaccctctaaactgcgttgacaacgtaaacttaaggcagacactcagccttctgagacactgccatgatcagatacaacacggaaatctaccttctcaaaagagaagcctacaattgtgttaaaaatataaacaacccacacctcccttgaaagatctgtccctacctccattttgattaaagatataaatcacccctttataaaaatagaacctcagacccatggttcccaactactacgccaaggtacgccaaggtaccccaaggtgccaccgtgaactcacagggtgccaccgtgaactcacagggtgccaccgtgagaactcacagggtggcactgtgaactcacagggtgccttggaatatttttaattttgaggtaaacacagcaatgcttttgccatctgtcagacacagcaccaactgctcactcaaggtcattcactgcaacactagaccaggctaaattcctttggatgatgctttatctttgaaaaactgggtgtatgacagttgctgtgattaataagtgagaactgcatgaaaatcaacgtggatgaggaaatgattccaaggtctgagaggctgtacaagggaccagaatatggaaaatgacattttgtgtatactgttttttcaaaaggctaatcagttatcaggaaacaaatacatgctgaggatcaactgtatccacttcttaaagacatgggctacttcgttaaatagctttacacagaaagctgaagactggcagggcgtggtggctcacacctgtaatcctagcactttgagaggccaaggcgggcaaatcatgtgaactcaggagtttgagaccagccttggtaacatggcgaaaccgcgtctctataaaaagtagcctggctgggtggtgtacgcctgcagtagtcccagttacttgggaggctgaagtaggagaatcacttgaacccggaaggtggaggctgcagtgccactgcactccagcctaggcaacagagtgagtccctgtctccaaaaaataaataaataaaagctgaatattaaagtggcagcagaacacaaaaatcagctgagactccagcaggaagctggcaaggctgcgtgggtacaggtggggacagatgcgtgtttttcaaggcccatggtggctgcccgtgccctcctcccagggattccaagaggaggtttgaaaattcactttacttttcaattttgatctccacagaatgatgtctgtcgacactcgataatttttccttcttcacttcgcactcttttctgtcggaaagctttttcccagcaggctcatttttggcctaaaatataatagacagaaatgatgtgtggcccagagcttctcacttgcaaactccatttgcgagttaccatagacgagaactgcctcaccttctctacggagatcattcgtccatgcagctcagttctgtggagatggctgatgcacttggtcgcctcgtcagatgtcgacatggtgacgaatccatagcatcgagcccccgggctgcgggcgttcgttaccactttggccccgacaaccttcatgaaaaagggcactcttactctctcatacaaatgaccacacaacttgctaaagttattacctggcaatcagaatcattttcactatttgtcacctctccccatatggtagttttccattttagttactgaattggttctaattaatcctgacctatccaaatacaattgctttttttttttttgagacagtttcgctctgtcacccaggctggagtgcagtgtcgcgatctcggctcaccgcgacctccgcctcctgggttcaagcaattctcccgcctcagcctccgaagtagctgggattacaggcgcccgccaccacgcctggctaatttttgtgtttttagtagagatggggtttctccatgttggccaggctggtctccaactcctgacctcaagtgatctacccaagtcggcctcccaaagtgctgggattacaggcatgagacaccgcacccagccactaaatacaactgcttttaatacaagataagtcatcacaaggaaaacacacaaacatgcaaggttataaaaccattaaacttcattactcacaactaataaccagaagtcctacccatccacattgttttctctatttccactgtgcccacaaacagctgtggggctactaagaaatgcacccatccactccagctgggcctgagaagagctctgacacagacatggactgtcagaaatgtccccatggggaaaggacttccacttctggctgagatgggagaactaagcattgtcttcctgcctgaaacaactaacaaatgtgatgaaacgtaggcaacgacagttttcagatcctggacatcaggctgcccaagacaacaatccctgagagctccctgactgcccctgctcactgcctagattcccaggcaatgggggatgggtaagacagcactgagattctgagaccaagacagagagaaatcacggaactgagtatcagagaggacacagccacacagagccacgcagagcaagctgaagagacccacagagggttcctcccacccagtgcacacgtgtgcgaggaaaccagaggctgggacagcaccacccataaggagcagagggaacaatcaggagcagagggaacaaccactggaggggcactcagggccacaaatggtttgctcttcccaatagccagggtggaaaggctggtaattcacgggccatcagacccactactcagagggcactgcccagtggtgagacaaaatcagcccaaactgaaggctactttggccctgccttagtgtgtgtccagtacctcagctgtgtcccagaaaaaagctcaagggtatttgtagagatacaagtataactagcacccaaaaaatacaattcacaacatccagtaaaaaattaccaggcacaggctgggcacagtggctcatgcctgtaatcccagcactttgtgaggccaaggcaggtagatcacttgaggccaggtgttcaaaaccagcctgggcaacacagagaaaccacatctgtaccaaaaattttaaaaattagctgggtgtagtggtacatgcctgtggtctcagctactcaggaggctgaggtgagaggatcgcttgagcccgggagctcgaggctgcagtgagcaccactgtactccagcctgggtgacacagtgagatcctgtctctaagggaaaacaaaacaaaacaaaaaaaccagaagaaacttaaaagcagccacagaaaaagagagagaaaagacacaaattggtaactgaaggaacaaagattaaattaacctagaattctatacccagtgaaaatttatttcaaaatgaagacaaagtaaagactttttctgacatgcaaaagaaacaagaacgtatcaccagcaaacctgcactacaggaaacattcaattccttcaggagggaggaagatgatctccgatgggaacttggatatacaacaaaaagcaacgaagagcacctggtgaggtgaacatgattttttcctgtcatttctgggtctctttaaaatataactgtttggctgggcgtggtggctcacgcctgtaatctcagcactttgggaggccgaggtgggaggatcacgaggtcaggagatcaagaccatcctgactaacacagtgaaaccccatctctacttaaaatacaaaaaattagccaggcctggtggcgggcacctgtagttccagctacttgggaggctgaggcaggagaatggcatgaacccaggaggcagagcttgcagtgagccgagatcgcgccactgcactccagcctaggcgacagagcgagactccgtctcaaaaacaaacaaaaacaaaaacaaaaacaaaaaaaaacacaactgttcaaagcaaaaaagccaaaccacaacaagtcaaagccaataaaatattgggtgacttcttaaagagaagtaaaccgtatgacaataacatcacaaagatcgacgggaggggaaatgcaagtatattcccacagagttcttgcactacgctgaaaccaacagagcaccccttgcagacagactgtaagggaagatgtgtactgtaatcctacagtaaaccacaatgacacagagttagagcaaataagccatcagtcataaaaaggactcgacccacaagaaggcagataaatgggaaaaagagatcaataaacaaacatgaacagaaaatagagaacaagacagtagatctaacgccaagcccaccaccactggcgcgcagagtaaacatttccccgggacacaggagtcctggtctctgccctatctctgactcagggcatcaacctaagcaaggcattccccgtctctggacctcatggccccaactgtgaaatgacaaggtggaacccacaagcttgaggttcccatctgacgtccttggttttgaccacacaaatggaggagtcaaggctctgcctgaatctgtccagggccaaagggacagaagactctcctgagagaaacacagatgccacttcccattctaccttcccatcaaattaatcatccttacaagtatatctcttctgatgacagacaaaacccaaatgagagcaggcaccatactaagcttgtatgtccctatccctgagctatgccatccgccctggaggctctgcatacttcagtcaagtagctgagtggtgtcctgcccctctggccttcctacgtccttctgtttttgtccagagctgagccccacaggtaaggccaactctgtcactcacgcctcagctgaatgtcacttcttcagcgagctctgctgaagctgcctcccaaatctaaacacggcctccccaacacactgacggcgtgctctaatattccttaatacgctcatcacaacacatcatatgtgtttatttcttaaatggtctttttcccgccagactaaaaaatctgtgatgacagtgaccacgtatgtttacctctgcttaatcatcagtgtccgagtgaagtcaacaaagtaactgaataaacaggttattcatggctataagaatttcctaagcccttgctgaacacacagactgttcagagaaaaattgaacagcacgctttctccgggtcctgtccgcttcttaagcaatgaaacattaaccaacacctgatcgggtgacacagacctagacaaaggaacggcttctgtagccagaaaactgtgtcagacagggcccactctgcctggaatcagggcaccctccagacactaaatggtccgaaccttgtcccttggaagccactccccagaggcacccaggagaccagggcagtgccaattgcttaccagaagactcttggctaggcgcggtggctcacgcctgtaatcccagcattttgggaggccaagcaggcagatcacataggtcaggagttggagaccagtctggccaacatggcgaaaccccatctctactgaaaatacaaaaattagccaggcatggtggtgggtgcctgtaatcccagctactcgagaagctaaggcacgagaatcacttgaacctgggagggaggcggaggctgcagtgagccaagatcacaccactgcacttcagcctgggcaacagagcgagacgcagtctcaaaaaaaaaaaaaaaaaaaaaaagaacaacaaacaaacaaaaaaagaagactcttaattaatttcaaacagtggaatcattttaaattgtcctcaccttcctttggaaagctgctgaattgtactatttttctcccacccccatgagcagcatcttagtgatttatttttgaaccacgatcatgttctagttatgagactatatacttaaaatgctaaatgatatgaaagtcaattattcacttcattctttttttttttttttttttttatgacatagtctcgctctgttacccaggctggagtgcagtggcacaatcttggctcactgcaacctctgcctcctgggttcaagtgattctcccacctcagcttcccgagtagctgcgactacaggcacagaacaccacggctggctgatttttgtatttttagcagagacagggtttcgccatgttggccaggctggtctccaactcctgactttaggtgatacgcccgcctcggcctcccaaattattcttaagggaaaaatctcatcatgtaagctttaagttttgcacaagacaaaagaccaccagtctctttgagaccagttagaaagaaccccaagaacattgagagagaagctgtttatacagctgttctgagcactgttgtgatatgaccaaccacctgccctgctccgcaccctagttactgtgagtcaggaaacaaggtgcactgcacaagactgggcgagcttcgctgctgtcgttccattttttagtaaacacaacatcttgctatgttgcccaggctggtcttgaactcctgggctcaagcaatcctcctgcctcagcctcccaaactgctgggattatagacgtgaaccaccgtgcccagcagagcttcctttttaactctgaatcacagtggatggtatgaggcaagggaaggcataccttcccatacttgctgaaaaggttcttgagatccgtagcgcgtgttgtggaggacagcccgctgacccacaggttccgaccagaaccgctgccgacccgacctggcacgagagggagattcttaggcatcaccccaaggcctaacaggaagcacaaccattcttaagaccgcagccctctttaaaaaccctaacgacgcccaatcccaactgctgacttaagaatttaacgcacacacacatgccaacacacagaaggctgaaaatctggacagcaaaaactgagtttccttactcaaggaataatcatgcccatgtcagttatgaactgaaatgtcttttgatgatcagatctcatccaagacggcagtctctaaaatccttgaaacagtcttcaatgagcagaattattcctttcttgtaatgtgcttttcaccatcccatagatgacaaccacaagagaaacataaaatgcaggtgcttgcgaacttctaaaactagtctctcaagaaaccattaggtggttgattccggtaacccataacaaaacaaattactgaatccaaagtgtgtatatctccaggcccctcctcccaaaataagggaaccatacctggctccctaccacgttaaattaaatcatacctttttcatctttaatgattggctttatatctttttcttccttaaaagagctagagacaaaagttaatgttactcatacaggaaaaaaacgaaagagaacaaaactaaaaatatgattatgtgctaaaactgaatacctaccagaaaattagtctgaaataaaattttaacagacacctctgcaagcttatattggaaaatctgaccccaaaaatacaatgtcagatttgtaaaagtcaattcgatttagctgaagataacaattaacaatttaagaacacaaccatggtaggttgagaaaaagaaaaggaattgaatcacccattaaaaacacacaaagagaaacgaaacattctttagaagcaaaactacaatttcgtcagtctggctggccaattgcagaaaaaaacagcttatgtgtgtcattacatgaccaatgaaaaggagatagcgtctggtctaaaactgagaaaaaacaaacctcattttctgatcagcgccctcactggttgaggactctttaggagccggagggacttcattacaagcgtcaaaatcaaacttcctcccgtcttctttgctatctctggcttctgggcttggggcttccgtgggtgcttctgcgagctcctcgctagaggcctccgcgagctcggaggccgcactactctgctcaactgccggctctagccctacaggctcacagtccgtcctctcgccatcgcctggctgctccgcgggctcccttttcactaccgctaacaggctgtctgccttgctcgactgagcgtgtgctgttgactcgctggccaaatctaaatcaccctcttccggatgggcgctgtcaaataggtcctcttcctccgcaagctttctgtctggccccacgctacttgtgtcctgtgcaaatggctgctccagctcggaactttcttcttttactggctcagatttacaagtttcccccaaaatgtcgagtattttctcattttctacggatttaacaggaatagaatggcacaaggtttaattaccagggaaataaagcaatcacaaatgtggaactggcacggctgccacactaacacgaagagaactgctagctacacagagattggaaaacccgcgggtacacaaagttatactggttacactacctgcgccgcgaccgcctctaggtaagcctctacgctacacggaagagaaaaggcccccacagatttaaacacctacaaccacgcggctggttctcaatagtcttcttcgagtttttgttcaagtctgggtcttctgactgattttccaatgtccaaggtgctgaaccgaatgcaatcaccattcaatgacagctcaacttccaaatttctttgaatttcttttaacagaacaatccaatatgaaaatcagaatctcttctgacggtgggagataaacgcagtccggaaggggaataatatgttgaaaattttcacggagaaactctgtttcctcttctggaatccagtcacttctcaggtggtaagtgccctgacaacagctttatcctgccttaactgcgttaatcaaaatgactgcagcaaaatatcacaagatctgtttcatgtgtagaaacacatggaggaatcacggggacgggggaattaaatgccactctacgtggttagacatgaaaagaatcactactacattgcaccaaatgtatttgacctcaagaagccagaatggctcttccacagatctggtgatacgaatgggtttccaatctctgatccttgtatgatctggattgtccaccattagagcaatttacaagatcataacacagcttaaaatatagacagctttaaaataatagtgtgaaaactttcaaaccataactgtcgtgtttctcttatcagtacctggctccaaaagggattcttcaatgtcctatttaaaaaagaaaaagcaaatccacaagtcactttaaacacggggcacatacatttcaccagtaaatatggctttcaatcatctgtgaataaatgcctgtttccacaaaactttcttgtctccaaaaaatgtattccatcctacaataacctgatgaaaaccagctcattttaacagtttccctggtaacagcaggtccctagtgataacagtctgtcccattctcccgagtttgggccctgccctgccatgccacccaccccatgaccaagctgacctagtggctgctgcagctggcaaacaccccctttgtcagagaagaggtcacagtggatttaagaaaaaaatacttctcccaacataaactgatttgtaactgaaacctgtcataacaaaatgatctctctactctgctgaaaaccttttccgacatctgtctcacttaggacaataggtccaatccttctggtggcccagactcagcgaggcgggcccagctgctctgcaacacctctggcttctatccaaccctgtgtgctcccctctctcttttgcatcagagacaccacccaaactttctgctccaaattcttctttccctcttcaacctatccgtcagacctctgggaagagttccaggcacttatgaagtccaaccaccagaactgctccctcatcacacttctttctcccttctggttacatatttggtttgatcccactgcccctgctagatggccagccctgagactgtttctcttctgctaacctcttaaccccagcatccagcacagtatccagtcatttccatacacatacacactgctctttcattatggaaaatcaaccactcgattaacatttccagcgatgcagaaccagatggtaacttaccggagttactttgaagttcaacgatgaagtttccaaagtgttcttaaatccttccccatccacctgaaaaacaaaatggaagatgacttcgtggaggctggagctatgaaaaccaaggctgacacctcgcttaggcaacttgtgtgtctatttccctcacggcaccttttgccatctgcaagtctactgttgggtcattcagttcagcacctgcctctccgccagaacacacactccacgactctgctccaccagcgtctctggcagtggcctgcaggtgggtatgccctgtctgtactgggtgaatgaacgaatgaatttcccaggcagtttctaagtactggtgattaccacatacccctccaatcacaggatttccaaagcagaactcaaaatgataaaatgcacccctccaatttcacctggtagcaatactcttaaggtaacactaaccgggcactttctcctagcctactttattcattcattcattcactcattcatttgagacggagtgtcactccttttgcccaggctggagtgcaatggcgccatctcggctcattgcaacctccacctcctgggttcaagcaattctcctgcctcagcctcccgaggagctaggattacaggcatgcaccaccacgcccggctaattttttgtatgttttagtagagacggggtttcaccatgtccaggctggtcttgaactcctgacctcaggtgatccgcccacctcagcctcccggagtgttgggattacaggtgtgagccaccgcgcctggcccgcctagcctactttattaaaaacaaacatctaacttggtcaatttctctctttactacatgccaaacaaaagaaaaactgttaacaccaagttttactaaatctgaagctctttttaagtgaactacaaaaacagcactcccaaatattttcttttttccttttctcgatttgaactcatgacctgggatgcctccattaactgagaagtacacactctgaaaacaataagcacacagcagtaccagactgagaaaggcggctaaccagttgctcagtgctgccctaggtcaaaggatggtaaatttggaggcaatgacttttgaccgtaaggtttaaggttcagtcctatggaggcatttccacccccaagctgaaagctgcaatgccttaaggaaacaaaacaacctactgggcacgtgacatcagtcagagtacaatgaagatcagctcgaagacactgacagcttgtgatatttgaacagcctcaccagagagctctacgccaaaacactagaagtgaaaagctgggaaagccctaacagagcaaagttcctcctttacatacaaggatgctcacagtcagtccttttggggagcagggttgatacttgtcttcactgtactttacatcttttaatgtaactgcttaaccttgcttaaaacaacattaacaggctaggcgtggtgactcaccactataatcccagcactttgggaggccgaggcaggcagatcacttgaggtcaggagttcgagaccagctcagccaacatgatgaaaccctatctctaccaaaaatataaaaaattagtcaagtggctgggcgcagtggctcaagcctgtaatcccagcactttgggaggccaaggcgggcagatcacgacgtcaggagatggagaccatcatggccaacatggtgaaaccccatctctactaaaaatataaaaaaatcagctgggcgtggtggcgcatgcctctggtcccagctcctcaggaggctgaggcaggagaattgcttgaatcagggaggcggaggttgcagtgagccataatcttgccactgcactccagcctgggtgactgagagagactctgtctcaaaaacaaacaaacaaacaaaacacaacattaggaggaatatctacatgatgagattagaaaccatttttgagctgggcacggtggaccacacctataatcccagcactctgggaggctgaggcgggaggattgcttgagctcaggggttcaagatcaacctgggtaacctagtgagatcccgcctctaaaaaaaaaaaaatttttttttaattagctgggcgtggtggttcactgtgtagtctcagttatgcagggggattgcttgaacctgggaggctgaggctgcagtgaattatgatgaccccactgcactccagcctgcacaacagagcaagaccctgtctctaaataaataaaccatctttgcttcttaaaactgtattttaaaaggaaaaaactaaatgggcactgtggcctgtgccaataagcccaggtagtcaggaggatcgctggagcccaagagttcaagaccggcctgggtaacagttgagacctcatctcagaaaagaaaaatcttttatgtcagagctttctattttatgactcaccacatgcttcgaattataaaaacactccccagtgctacagaaaagctatctatgagtaaatccctgagctacacagcgtttaaatggacatggtttaacaccagggtgtagaagcagaactgtgtgttcatggcggtttagctgtgttctccctcacacgagcagcacgcgagcaccaggtgcctcggggctatgggcacatcctgccgtgtctccaagttacctacagcatgctctgggggctgagccgggagctgtctcagctgtgcagccacgtattctttactatcacaaaaggaatcgagaaggccgtccgtgccatcctccccaaaatctggagcactgctattcgccacttcagtttcgtctagcacactcatgtccatcatgcccatattctgcaggttctccagacttgcttccatgtcctcctgtaaagaggaagaagaatcgttaacgaccacctggaccaggacagggagctgctgcttgtcatctctaccctgacatcacttacctgcccgtctctggaatcgtcttccaggccattatcttctgtgccttcctcctccatcttcagtcctaattacagaataattgttcaatcagataacactcaagttctacctcataattagtttatgcagaatagatttcaatcttagaacagaacacattacaagataaactataagtctcccctctcctgtcacacgtaattttgtctcaatttgttttcttttttttttttttttttttttttttgagatggagtctccctgtgtcacccaggctggagtgcagcggcacaatctcggctcactgcaatctccacctcctgggttcaagcgattctcctgcctcagcctcctcagcagctgggactacaggcgtgcatcaccatgcccagcttatttttgtatttttagtagagatggggtttcaccatattggccaggctggtctcaaactcctgacctcgtgatccaccagcctcggtctcccaaagtgctgggattacaggcatgagccatggtgcccggcctcaattggtgttctaagtaagccatcaacagggagatgaaaatctaggattcctcttagattcagagtactctgattttccacaaaatatctaaaagtttccaaatatttcaaaaacactccaaacctaagaaaaaaaatcacaaaaaaatgagcaaaggataaaaacaggcattttcaacaaaccaacaaaaaaatgcaatacccatctagtaaccaaagaactgcaacataaaataacatattgagttagtgatttgctggctctccctatattccacccatttcaagtaggtctttgtcattttttagctcaagaacttttttttttcccccaaggcaaaaaggcaaaggctgccataaagtcgagaatcatcctgggttttgtgaccacaaaataactatttgatagaattctgctaggaattgcaaaaggaggccagaggagttcaagagtggaaaccttgagaagaaacttgaggctctatatgtatcaaaaaccttacaaatgtgcataccctttgttccaggaatttgagtcttaggatatctgacaaggagttcaaaacatagatatctgtcctattatacctgttaaacacccaaaagggaaacaaattacagcatattttcattcagatatggttcacaaccggggggaatggctggcaatgtctggagacattgttagtggtcatgacctgggggaacgccattagcatcagtagctagtgatgctggtcacgaccctgcaatgcacaggatactccccaaccccagagaattcttcggcccaaattgtcaacagtgccaatgctgagaaaccctgtgggacaccatccaatgtctcacaatatttaaagaatgtatgcttttaaagaatatttaatgaaacagaaaaaatgcccacagtgtaggcacagtggttcacgcctgtaatcccagcattttgggaggctaaggcaggtggctcgcttgagcctaggaattaagagacaagttcgggcaacaaagtgagacccccatctccaccaaaaatacaaaaattagccaggcatggtgttatgtacctgtactctgaattaccggtgagaatgaggtgggaggatgctccgagcctgagagcttgaggctgccacgatcatgccactgccctccgctctgggcaacagagtaagaccgagtctctctaacatacacaccgataaagaaaaatcaaacagaaaaaaatacatactttcccgtctctactaaaaatagaaaaacagccggacgtggtggcgggcgcctgtagtctcagctactcgggaggctgaggcaggagaatggcctgaagccgggaggcggagcttgcagtgagccgagattgcaccactgtactccagcctgggcaacagagcgagactccgtctcaaaaaaaaaagaaagaaaattaaacataaaaaacctgcagggtctacacctcaagagtctcactcaccactattatcaataatcactcaagaaatgcagtttaattgcatgtctcgcaacgtgagctttttccagtctatcatttaagacgcctaacaacgctagcaggttttattatctgcatttgacacgagaatttggttgagctccaaagctggcactctaaaactcagctgtcccacttcgcattatatctaaacacagcatatccttttgaaatacgttgtctaaaaatgtttggtaattgcacccaatttctaggcccctaaatagtagcctgcagtgcccacataggccggaaataggagaaatgctgaccaaaaagcatcacagaaaagctaatgtggcgcagacaggcgacgccccaatccccggcacctggcattggccaacgaaaagctgccgctgctggggacacagatgtaagaaaatccaactttaatcccacatggcatctaaaacttaaatttttaatccaagttttattttttccaaacccacctacaatgttgcctaggactcctaatcttggtgaagacccttactctgatttataatgaggacacttttccctcaacaagtttggctacttcagtttttgcaaggaagcagttactggtgagttcccagaatgagtccaactttggactcaactgaacactgctgcatagtgcttgaaacgaaaattaactggtgaattcctcctgatctaacagttgtatgtaatcacaggccctaactgcaaccacaaagtcctaaggctcttgtgctttatccattagccacgtgccccgacacctctagagaacatcaccagctcaggatggaagatgaggcctgcagggcctgagcaccacctgaagacctgggctctctctgggcttggttacttctctgaaaaaggaatgggaagggatcagaagcccttctaaccctcactagagctgaggctacaaaagtcctttttatagcaacagaagaactttatcatccaagctttcctgacaaaacactaactccaagtagttttgaatccacctaagctttaatctagacattcaggcaggtcttcaaagcactcagctaaagtttagtttttctaatgatgcaaagatcattagaaatgatccctgctaggccgggcacagtggctcatgcctctaatcccagcactttgggaggcccaggcgggtggatcacctgaggtgaggagttcgagaccagcctggccaacatggatggtgaaaccacgtttctactaaaaatataaaaaagtagctgggcgtggcgacgggcacctgtaatcgcagctactcaggaggctgaggcacaagaatcacttgaacccgggaggcggaggttgcagtgagccaagaccgcaccactgcactccagcctgggcaacaacagcaaaactccatcgcaaaaaaaaaaaaaaaatccctgttaaattcctgctaaaagccaaggatattttgagtagtaagtcttgaactttacagttttaaaatgagcacctacataaaaaacttttaaactttattgttaagcagttttcccaaccactaaaaaaagaaaattcacatcatgcataagttaacacctaaacagaagagataaactatatttcctgcgtagaccagtctctcacattctgaatgtgctcaggctgggccttctaggtgaaatacggacactcacaagaacagcaaaaacgcatccatgtgtcaaaattaaactttaacttaaagctcttatgcaacctaactaaaagatttaatctttcaaactacatgcacatgttttaaacagttaatgtgttatgaaacacattaagaagaaaaagctattaaaaaaatgaaattgttaaaaatgctacaatttctttctactttctaagcactgatcctccactgcctgaatttagcacttttccaagaaaacaggccccctgcacaggaaacctaaattatattatccttatcaccataaaacctaacaataccaactgggatagtcaaagcttcaaagttttatggaattcaatgctttcaaaaataactggtatcagccataaacaggaatgaagtatcaatacatgttacaacacagatgaactttaagcattatgctacgtgaaagctgatgcaaatggccatatgttgtacaattccatctacatgaaatgtccacaataggcaaatctatgcggacagaacatggattagtagttgccaggggctggagggagaaaagtaaggcgactaacttctaatgaggaccgggtttcctttttgggtgatgaaaatccagaaggagacggtggtggtggtggcagagccttgtgtatacactaggaagcactgaattgtacaccttaacctgatgaatttaacggtctgtgaattaaaccttcacattcaaaaaccgtaatagtaaaaaataggctgagtgcaaataccccaacaatctactttggaccctagcaaagctgagttctattcggtctcaggttggtgtccttttctttgggttaagacctattttttgaaccaggaaggaagccaagtaggtacatttggttcctcagacccgtagaagtagctttaagagcttgtctttctctagttgacttttaatcccaatggcagaagctgaaacgtttttcgtatattttaattgcacttggcacctgtacatctctttcctcctccctgtgcccttgacagagctacctgttaggtggtgacgagcaaagctaactcttagtggagggacaccgagtaccagagaaattctcccagcctagaaggcgggaagagcacactacacaccatttctctaaattctctgaacactcaagccccaagcagcatatgtacaatacctttaacacatctcttggctgacttcttgctggtggcttctaactcgatgccaatttcatcaggatcttgcccctcttctttaaccgcctattagggagagatgagttttacaacatcattaagagctgcagggcacacactgttccttacaagtaacaacctcccatgaaacaaaggcaaacccgtccttgcaaagagcaactccgggtcagctatctgggccgcaagcccaaaaggcggaggaggaaccccgcacaacttgggtctctctgggtccaaatgacaaaggagagggaggctgtgagcaggagctccagaattggggtcaaggaccagttccaaaatggcaactcaactcgacaatgccaaaccttcgactttaaagttatatgatgggacaaattagaacagagaggctgcacttggcccggcctcggtgaagggctggccaccgctggtgaggaggaacagcagccagcctggggagattcaacaggtccctcagtgcctgccacctgccgggtccaggactgggtacccacaagctccctccctatgctcaagttgtttgttccagttgcggaaacagacaattcccaaccccttaatattttgcatttagcccctgctttcagcgaggtgcgacacaaacgcaggatgagctggcaaggaggtggggcagcgcattaggaagggcgctcaggaaggtgatgtctcaggcagacccaaaatgacaacaaggggccggccacgagaagatctgggggacccgggtggacagcttcgtaaaggccaaagccctggggcaagaacaagcaccgccccctttcctgtaaatgctctggagtccgccagacacccattctccggaggaggaaactgaggcacagagagaaaggcacctgcccaaggtcacagagccaaggctcgatcgggagccccaggaggggtcccggggccaccctggtagcggagaagaccgcacgctgagcgcgcttgaggagaaaaggtggaaagaggataggaagggaggcacagagaggagcggtgacgggccaaggtcacacagccggccccctgggtgcccgacacctcgaaccggggtcggccaagacgcggggcgaacccagggcgccccgggtccgggagccgcggtgacaggtgcaggcgggggcgtgcccgggcctcctgcgccacccccgagccccgcgccgcctcaccttcttgagccgctccatcaggacgctcttgttgccgcccgtgtccaggttccgcttcttcagctccgcccgcagatcgatcacccgcagctcgctgagccgcctcgtcccagtctccgcaacgcccgggccgagagaagccgtgccagggcccgagtcgcccgacccgggcagagtctccgccatcgtcgcgttcccgtcttcgccaccgactcagtcgcacaccgccggcagctatagcggctctgaacacaaaatggcgccgcctaagaggaaaacgcactcgtttcctcccgccccgctttgcggccgcgcacgcgcacgcgcaccgcccccactagcgtacttagcagcaaggacgctcgcgcgtccaccaaccgcgggttccccggcacaacgcgcaagcgctgaatctgcagctcgcatgcgtcccggcagttcccggcgggaggctgacgagacgcaacgcgtctgcgcacatccccgcgttgttctcactgcgcatgtgcagttgcaaccgggatactagaacctacgcttggtgcgcctgcgcagaagcgaggcgcgctggggcgactggagcggttccctcgcaggcggcgccattttgtgctaggagcctgataaaaccggcccggttctgtggaaagtgggcggcggagccagggtccctggaatggcggagactctgtcaggcctaggtgattctggagcggcgggcgcggcggctctgagctccgcctcgtcagagaccgggacgcggcgcctcagcgacctgcgagtgatcgatctgcgggcggagctgaggaaacggaatgtggactcgagcggcaacaagagcgttttgatggagcggctgaagaaggtggatttggggccccgagggcgggcacagggtgggtctggggtcctcttggccgcgacggtggctcgcgggccctggcgtccgcccccggccgcgttcgcggcctcgccggacctggcgctctcgcgtcccccggctcctccgaggccccggagagagttccttggccggctgggcctgggttcaaatcctaacgccgcaatggggccaggagaaccacaaaaacggcacgcgtgcaggagaaacggtgacgggtgacatcgtccactgagaggagggttctcccctcgtctcgtcccctcctccgtacctggaggggagaccctgaaaccctcacttcccaggcgaggggaagggactcggccaaggtcacacggccgaggacgggcagcgtcgggatttgaacccaggccctgggattcctgattcggctgcttggtttccccagggaagatgctttgtgacccacaggggaccgaccagcctgaatcggggctgatttacaaaggaaacacccgtaggacatactcaaagggaaaaatagaaaaaaacccaccacaatccagttttcacggtttgccggtactcgctcggtgaagtaacgtggcaggaaggaaaagtggtgttgacggtagtgatcagaaatgtgaaatgaggggagaccccgggtggactttaaaaccagcctcagaactgcccgggaggcgggcagagcctgggctcccccagctccgtcagtctctctggacttggggaccctgccagctctcggtggcctgatcttgggcataggagaccttgaaccccttctgagtcctcttttctattctttttttttttttttctcctgtaagaagcaaaaaagcaataggactttgatttggggattaaataagtttgcgtggagcaggcttggcgtgctgcctggcgcatgtaaacactcggtgtgtggttgccatcacgattcgcttttcctctctgtgccaccacgagtcctcatttgcagatcgggggctctaacgcctcccttgggggattcaaagggatccctaggaaaagcagagaggcaagtaaaggttagccacctgcggtttccttattcctgtagctttttttctctgccttttttccacctggctactctgggacctctcccctgtagttgctccgcctggccgcccaccccccagcccctgcaggcagtggggctgttgacacatcccaccatcctgactccggaactacggagatcacagggctttattattaattggtgatgagaagaagtagggatttttttttttttttttttcctgatgagaaaccctgggctcaagggtggatagttgtctcggccagagtcacatgggccttttaaaagctcaagcttgtgtttcttttcactatggattctctttactcagataaggcaggaagcccactgatctacatatttacccagagaaaatgcagagagtggagattggcggctggtcaggtgtggtgccccgccaccagggcctcccatcagctaagccaaattaagaggctttatcctttttttctccctggacggtccataggcctgaaaagctgctgtgatcttcctgtcaagctggtgactgagacttcccatcactcgctgtcatctctgagagcacagatttgttccttcttccttctccttttcattttcttcaagatgtggtcccaaaacacgaataccgccagcccatatccctgtctgccactcacccaagccagtctggagttcctgatctcattctcttcccgtttctgtcatcctgttggtgtccctttcttggtttatttttccaggaagggcaaaagaacaaaaaggggaaacaggacacctgcctagggcattgcttctcttctcctggtggtgtttcagaattgcctgtccccgggaaaagggtgagggacttggtgattgtacttttccttgatcccaggaaagaacttcagtcccttttctggcttctgagaggagagatttttgttgctgctggtaaagatgagatgtggaacccccaggccctatctcaattcagacttacccacctgggaaacttggaggcttccaaacctctgcagataaaacatagtacatgaaatgatgtaaacaaaacttgtgctcatgggactggagagtaaagactggaaaagttatcagtaaaacttgacctgaagctaagtttctagggacgtcatcgtgattgacgtgttcggtactgatggcttagttgatgccaggcactgtgctgaggatgggcatagttgaagtgagtgacagagtcctggggtgggaggctgggcgtgccaagaaattcttataattcaatatccgatgaggcacaatcacctagtggttgagaatgaggtactggagtcggttgtgaatgtacatgatggggatcggatgaggtcatgcatgtcgtgacgggtctcgtgcgtaacacatagtaggatcccagtcagcgagcattagtattctgtccacacagtactgagtacaggcacggcgtggagggagtccctggagggttaaagagtattttgtgagtaaagtcaggggaaatggagagtgtgcctttccctttttgagttcttctgggcttaggaaggagatgaaccagataagcctactgtttgttgagtgcttccttttcatggctagtagagtcctcacaacagccttccagggtaagtactgtattattattagccgcatgttccagaggaagaagcaaaaactgagcacctaagtaaacctgcctgggaccacccagctaagaactggtggcgtcagtcggtctccagtgtagagcgagataacagatgagtggatgggccacaggtcctgggtggtgagggcggcagcagctttttgatcttaaaaatacagtttccttgtcacctgagagctctctgaaagcagtgtgtgagctgactttttggatcaactttacttttcccttctttttaggcaattgaagatgaaggtggtaatcctgacgaaattgaaattacctccgagggaaacaagaaaacatcaaagaggtctagcaaaggtatggaggatttcataagcaagtttcatgttaagtgctttcttcaaaacgaatacattgctaatgtgcctcgtttacttgtctgtgtgttggacttgtgaaccactctgaactgggagccttcagcgaagctttgcattttctttcaagatctctctactgtgttttgttttcttggtatctgggaattccaatggaggatggaaggagtatttgtcctttattcattttcctctgtagattgtcagcggtccttaaataaggagtcttttgggagtcagtcacagtggcgtgtgcctgtaattccaggcgactcggggctgtggtaggaggatcacatgagcctgggagttcaagaccagcctgggcaacatagcaaaacccagctctacaaaaaaacttttaaaggcccggtgtggtggcatgcatctgtggtcccagctgcttgggaggctgaaccggaaggattacttgaccccaggaggttgagatcagcttgggcaacatagggagacccccatccccaccaaaaagaaattagccaggcatgatggcatgcacctgtgatcccagctacttgggagttttaggagggggatcacttgagcccaggagctcaagcctgcaatgacctaatgattgcaccactgcactccagcctgggtgacagagcaagacccagtctctcttaaaaaaaaggggggtgggggcggggcacagtgtctctcacctgtaatcccaacactttgggaacccaaggcaggagaatggtttcagtctaggagtttgagaccagcctgggctgcctctatccactgccaaaaaaaaaaagtacctaggcgtcgaggcacgcctgttttcctagctacttgggaggctaaggcgggaggatcatttgaacccaggagttcagggttgcactgagctatcatggcaccactgaactccaacatggagtccaaaaagtaggactgcctgagcctcctattgcttggacttggagaaaataacatcccttataaacagcacttggcaaaaacagaattgtcactttaacatttcttttaaaagcagcttatacagtaaaagtcacattccacatgacatgactctcaccatcttaccgaaatctctcttgcccatcccccacaccctgtgctttagtcaggccccaaacacgtgatttactctcctggttctctgtgacttcgctccgcccacccttccccatctgtctgccttagagacctagttcctcaaaagacaactgatccatcccaccaatagcaactcgtctccttgggtcctctgtcctcccgtggcatagttccttaccccttggtttaatatttatgtcatcttgccttctgtcaagagcagattgatgaggactagggctgtgtcttgtttatctttctttccccttcaatggtttaacttggtaacactcaactattggcttaagaaagaatcagctgaggcagggcgccgtggctcacacctgtaatgccagcactttgggaggttgaggcggactggtcacctgaggtcaggagttcgagaccagcctggccaacatgatgaaaccccgtctctactaaaaatataaaaattagccaggtgtggtggcgggctcctgtaatcccagctactcaggaggctgaggcaggagaattgcctgaacccaggaggtggaggttgcactgagcccagatcgcaccactgcactccagcctgggcgaccgcaagactccatccccctaaaaaaaagaatcagctgaagctgggcttgtagaccgaatgttctcttggttcatgtagagttttccctatctgaaatgcttgggaccagaagggtttcattttttggattttgtgcggtattttcgtacgcataatgagataatcttgggattggggcccaaatctaaacaagaaatttgtttcttatacacctgaagataatttaataccatattttttataattttgtgcatgaaacaaaactttcactaattccacacatcaggtgtggaattttctacttgtggcaatatgtcagtgctcagaaggtttcagtttcagatagggttgcccaacctgtaattgaaggcctggttctcagggcccaaaactaaatgagataataactaatacttggtggtgaagtactgggtttaaatatctgagagtcaggccccagtgtcagccacagtgtttggggtaagtgctgggagaacagcagaatgaagtcacttctgtggctcatgatacattgcgtgtttttgcctttactcaagtatacttctgccaaggcaaagagtcctggaaaatcaatggagaaagaaataataaaagcaaaaaacagagcctgtggatctccttttttgttttcctttttcttctgataaaagcaaatacttgtactacaggcttttgttgctgtttttgttttgtttttgaggtgggttctcactctgtcactcagatggagggtagtcgcgcagtcatagttcgctgcagccttgaactcctggcctcaagcagtgctttcacctcagccccacaaaacgtttagatttcagttgtgagccactgcgcccggcaggttttaaaatacgtgcatgggagtaaaaagcagaagttgttcacagtcgggacagcccactactaaaagttaggcatacttctccagactgtgtgtgtatgtacaatgtttaaaagtaaacttaggcctgggttacagagcaagaccctgtgtctagaaaaacaaaaagttaaataaaagtcaatgagctgggcatggtggcacacacctgtagtcccagctactagggaggccaaggtaggaggattgcttaagcccaagaggtcaaggctgcggtgagccatgagtgtgcttctacactccagcttgggcacagagtgagagggggaaaaaagtaaatatataggtatgtgcacacacctgtatgcatatttttttcattaaaaaaacccgtgatcttgctatacaaaatctcactgttttttaacaggctaataatcttctgtatgaataaatacacaatttagcccatcagtctttttattactagacgtttggagatttttatttccaattatcactcggtacttccaacattcagtgtttgcacgaaccagagataaatacctttgtgtggtcaaagtaatataatttttgataacttagtgaaaggagaattctagactccaaggatatggccctttattttcacatagctagtttacaaatagctgtcccggccaagttcagtggctcacgcctgtaatcctagcactttgggaggctgaggtgggcggatcaaaagatcagcctggccaacatggcaaaaccccacgtctactaaaaatacagaaatttgccaggtgtggtggtgggcgcctgtaatccaagctactcaggtggctaaggcaagaagatagcttgaacctgggagactgaggttgcattgagccaagatagtgccactgcactccagccttggcgacagagtgaggctgtctcaaaaacaaaaacaaaaacaaaaagctgtcccaggttgtaccctaccaacaatgggtgacggtgcctatttcactaaactcaacatcaaacttaccttgtttgcctgttaccttgttgcctgttatatagaagaaaagtatttcattgtatttatctgcatttttctgcaggtgagattttcgtttgcatttcttcacagattatactcttctgataattggacatttgtgtcgtctgaatggccttttcatgccctttgccgatttctgtgctgggttgtttgtcttattgagttataaagactcatataaaatgtttctattgttttaatctgtcattcaatttaatctgattcgacttgtggtattttgatcactaggcttctagattttatgttacgctttaaaaggacttctttgcttttaaattattaaaaatatgactgtaaggccaggtgcggtggcacacgtccgtaatcccacgatgcaggtggatcacctgaggtcaggagttcaacaccagcctggccaacatggtgaaaccctgtctctactaaaaatacaaaaattatctgggtgtggtggcaagcgcctgtaatcctagctacttgagaggctgaggcaggaaaatcgcttgaacccgggaagcagaggttgcagtgagccgagatcacgccactgcactccagcctgggcgacgagtgaagcttcgtctcaaaaaaaaaaaaaactatatgtataactctgttatatatagaaagaataatatttatggttttatttttacattttacatttggaggtttaattaatttagaatgtattttgcatgtggtgtgaggtaggtagggatgaaaacatgaaacatttaggctgggcgtggtggctcatgcctgtaatcccagcactttgggaggctgaggcgggcagatcacctgaggtcaggagttcgagaccagcctggccaacatggtgaaaccccgtctactaaaaatacaaaaattagctgggcatggtggcggatgcctgtaatcccagctactcgggagactgaggcaggagaatcacttgagcctgggaggcggaggttgcagtgagctgagatcatgctgctgcactccagcctgggcaacagtgcaagactgtgtctcaaaaaaaaagaaaagaaacatttgtcatcagaaagatcacttctgcccctcccagtgcgtctcccctcccagcccctgcaaaaataaaagtcgctgttgtgattacttcaccagatattagttttacccattctagaacttcatgtaaaatggagccatgcaatactagctcttttgtgtctcatttgttgttttgttttgcttcttgtaatcagttttattctagaaatttacagtacattttgatatctgatagggcaggtcggtaagttttcttgaattattttcaactactttatcagtgggttttatcaagattttaactgaaaatagagggactgctgtaatgtgtgaattcaaaatgctttaaaattccagaaagcatatctcatgtaatctcagttctcctcctattgcttggacttggagaaaatgacatcccttttaaacagcacttggccaaaacagaattgtcactttaacattttttttaaaaactgcttatacagcaaaagtcacattccacatgacgtgactctcaccatcttagcagactctcaaaataattatcaggggctgtgcgagatggctctcgtctgtaagcccaacagtttgggacaccgacgcggaaggatgacttgagcccaggagttggagagcagcctgggtgacatagtgagaccccatctctccaaaaaattagaaaaattagtcagatgtgatggcgtgcatctgtagtcccagctactcaggagactgaggtgggaggatcacgtgagtccaggaatttgaggttgcagtgaaccatgattgggctgtgattgctctccaacctggtaacagggcaagactctgtctcgaaaaaataaaataattaccaggaaactaaatttatttgtagtgtcatcacaaagtacaaattaataggatgttttatggtgtttgagaatgttttgtaactggagatgcaaagttggcctgtttgcttggttaagtattacccaatcctttgctgctggcttgttttgttcagtttttgttcattttggcaatttcatacttaagttgcaagaataatgcaaggaattcccatataccctttacccagagtccccaaatattgccatctgactacatttgccttgtccttttctctccttgtatgtatgtttttactagaccgcatggtaagttgcaaggcgcatatgcccctttgccctacgtactgcagtaaagtaaggatattacctaactgtagatgtccagatcaggaaattaacattgatacaatactgccacctcgtcttagtcctcatttagattcagtagtttgttccaataatattctctataactcagacaaaaaatgtccagagtcatgcattgcatcaggttgtcatgtttccttagttttctttaatcttgaacacttacacttattttgtagtttatttttctatttgaattgttttgggttctccccgccccataataaggatcaagttatacgcttgtcagaaatacaccagacatgttgtattcctgttttttgttttgttttggtttgaaaccgggtcttgccctgttacccaggccagagtgcaatggtgcaattgtaggtcactgcaaccctgaattgctgtgctcaagcgatcctcccaccttggcctcccaaagagttgggattacagacatgagccaccacgcccagcctatattgtcatcagagtatactatccagaggcacatgctgtcagtttgagccattattggccatgttagctgacttcaaatgctattggccaggtttctccactggaaagttactgtcttccttttcacagttacatttgtggggaagatactctgagactttgtaaatatcctgctcatcgtccattagttttagcaaccaccagttcctgtctattcatttattctggtagttgccaaatggtgattttttaattttgttattgtttgtttattacttggtttactgacataaggaatagcttgccctttgccctcatttatctgtgtgaacttagattattttattccataggttgaaagcctttatgcttatttactacaatgtgcaaaacgttccattgggaaccctgtcagacaggctcccctgtcatttccacatgttcatgccattcttgggatacttttttaccttctggaatggcagggtacgtgagtctcatcttatgcttttcctgccctttccccggaatcagccatttcttccaggtgc[145 bp omitted]aaccccatctctactaaaaatacaaaaaattaggcaggcgtggtggcgggcgcctgtagtcccagctactcgggaggctgagg[139 bp omitted]tgtacttctgtaactaggatgtcaactcctgggccagtacttggtttgtgagagctactgggctgattgtacctcaggaaattaagtactgttaaagcaatccgaagcaagccaaagacagcttaagaaaggtgacaaagccctcatgaacagtttggcaaacttgctagctggttaaaattgttaatcacttctccaggattttttaggtgacagttatatcattagtgaatcaaagaattaagcatgttgccagattgacattgaaatgtacataacattcttaaatagtaaatagaattaacaggaaattttcaagtcctgcgaaatcactaattagagaaaaatttcctagatgtgatgactttttagcagagaaaattttcctagatatgatgactttttatcagaaaattgtcacttttctccacagtaacctaaaaggaaattttataatgtgttccataatagtctaaaaagaaaatgcacaagaataactaaaattctgggcgggggggaatacagggatttcctctaattttgatgataggatattgcaaacaacagaaagtttgagggtttgttcatttgatggtgggggaaagctctaatcttatctcttcttgtgtaaaatagaaattccagctagtttaatactttttataatatagtaataagaaagacctgaagtaagaataaaactgagaaacaacaaagaaagagaaatttggctacataaaagttttaactctctgttaagaaaggtatgcaacagtctgggagaaaatattatagcacagaataaggaagaaactcatatccagaaagcattgaatgttctgacaaatcagtaaggaaaacaggcaacccagtcaacaaggagcagagactatgaacaggcaatttacaaataaatgaaaaagcagatgtggcctagagaccaaaagattcccttgctggtagttgcagaatagcaaattttgaaatgacataagatttttgcctatcaaactggtaaaaatttacacagttccgcaaggtgcggtgactcaaacctgtaatcctagcactttgggaggctgaggtgggcgggtcactctaggtaaagagtttgagaccagcctggccaacatggagaaaccttgtctctacaaaaaaatacaaaattaaccgggtgtggtggcacgtgccggtaatcccagctactcgggaggctgaggcaggagaatcacttgaacccaggaggcggaggttccggtgagccgagatcacgccattgcactccagcctgggcaacaagagcgaaactccatctcaaaaaaaaattttttttacacagttcctgttctcctacattggcaagggtattggggaaggtgtaggtgttggagacaataaattgctacagcctttttgagaaggcagctaacgtggggaactgccgtagcatggagtcaaagatggaggtggatcaatacgcagtacataaaaatgtccaaggcctgttagtagtttctgtaacttgtgtcattgctcactaacaataagatttcatctcatcacaagcttatttccatatgtatcatataatgtatgtagatgcaagatgatgtcctgaggcaccaccaagctgggaacgttggtaacctcttaagaggacagtagggaaaagggaaggtattatagctttatacttcctatacttaggaggatgaatcttctgttactgcagtaaagtttaatacgtatatttgcataattagggaagtgtgtttgtgtaatcaaatcagaaagtaatgaaccacccacatgcagccctgggtactatgggagcatcccagcagaagtccagggcagcagagtcagcagtgagattggacagtctctgaggcagaagcttaacagaaggcaagagatggaatcccaggcagggagctacgagcaggcgatagaggcgatgacggtcatgcccatagctgagaccacaaactagggtgaagagctgaggtagaaggattcaaggggcacattggccttgatactaaagacaaatcaatggctcttcagtttttgccagagagttatacttttcccatttgcattcatttttggtttttttagacgtttttcttctctggagaatactgtctttcctcaagtcgtgatgattaataaacattccagtcagggatgtgctttatacgttgaagattaaacattttgaagattgcatgttctctcgacatttccagtcacattttacctcgggggagctttcccctgagaaggatttggctgcagtgtacctgtacatactgcttgggagaaaagtggtcatagaagtggaaaaccctgattctgtttgatgaaaatctagtacccctcctgaggaagagagaacaccgtatggagggcagcaagtttctgataagttagtagatttttcctattatctggaataggattggacagaaaccaacgtacgtatcatagaattgtagcaactttatcaaatgtaatcattctgtggcaatgctctggtatctcttcccagcatgtttacagagaccactgggttgagttccagctgttttttagacctcgaggcatgttttgccaaagaaataatggtataaaatggggatggatttcccagccaactgaccaaaatatcatgtattgaattctgttatcagtttgatagtcccctatctttgtaaataaggtaattctaaaaatatgaatgaaattagaatatttaaacgtcaattacagtacaaataattaggtttggaatttttgtctttggcttttctttttttctccccccaggatgttacatatttatccagttacaagaatagtttccagtatagacaaattaattgtcttttcttttttctttgagacagggtctgactctgtcacccaggctgagtgcagtggcacaatctcagctcaccgcaacctccacctcctgggttcaagtgattttcctgtctcagcctcccgagtagctgggattacaggtgcctgacaccacacctggctaatttttatatttttagtagagacagggtctcaccgtgttgaccaggctggtctcaaactcctgacctcaagtgatccacccacctcggcctcccaaagtgctgggattataggtgtgagccacagtgtcagaccttgtttccttaatactgcttgaaacaacacttagccttaaaaca[192 bp omitted]gaggcaggagaatggcgtgaacccgggaggtggagcttgcagtgagccaagatcgtgccactgctctccagcctgggctacagagccagactccatctcaaaaaaaaaaaaaaaaaattgattttcaggctggatgtggtgactcgtgcctgtaatcccagcactttgagaggcccaagcaggagactcacttgagagcctaggagttcaagaccagcctgggcaacatagtgagaccccactgctacataaaatacaaaaattagccaagcatggtggcacgtgcctgtagttccagctactcgggagactgaggtgggaggatcccttgaggatcccttgatgctgggaggcagaggctgcagtgagccaagacatgccactgcactccagccttggtgacggggtcagaccctgtctccaaaaaaaaatagactattcttcacactgggaaagaggcctggcaggaagtagttttcccaaagttgtgtgtttgatcagcttttctcccatgttcttcaaaaagctgagcaccgccttctataaggaatgctaggaagctgtgctggcagtagctctaaaacatgaaatgatgctacattatgccttgcctttgagatgtggtcttccagagtctatttcatggatttcatgcatgtgattttattcttcacatggaagacagtcaaagagtttaatttgagcatgcctattcctgacaccagaaatttcatttttgccatgcctaatgacttccatttttgcttcagttctgttatttctggtatcatcgtttacatttttctattctctactcattttatcatttgtatgaaaaagcaaatgactatataaatactgctgtttggatgaaggtgccagcatgcctgcccttgtgaactgttgcaaatgttataaatcatcaattagtaagaaaaattgggaggttgcacaaggggagttggggaaatgacttccctgttcttagcattgttggctgacaggagaagtatgaacctaagaaggtatgcagcctcttgatgtttttcacattttttaaaattactaaactctttttattttatttattttgagatggagtctgtctctgtcacccacaccagagtgcagtggctcaatctcatctcactgcaacctctgcctcctgggttcaagcgattctcctgcgtcaacccccccaccgagtagctgggattacaggcacctgccaccatgtccttctaatttttgtatttttagtagagctggggtttcaccatgttggccaggctggtctcaaactcctgacctcaggtgacccacccacctcgacctcccaaagtgctgagattacaggtgtgagccaccacgcccagcctaaaattactaaactcttgaagaaaaacctggagttaagccataccttccaatcgttttttagtttctttttttttatacttaatcttagtcttttttttttttttttttttttaaagacagtctgtcttgctctgtcacccaggctggagtgcagtagtgtgttctcgcctcattgcaatttccacttcccgggttcaagcgattctcctgcctcatcctccccaagctgggattacaggcgcctgccaccacgcctggctaatttttttgtatttttagtagagacgcggttttgccatgttggccaggctgttctcaaactcttctcttgacctcagatgatccacccgccttggcctcccaaagtggtgggattataggcatgagccaccacgcctggcaagtattttctatttagaaaaacatggtaatgccacatatctaaaactggaacaaaaataacagatcagtggaagagaatggaaacaagtaatcccagacataaatacaaatataatattgcggaagccaacatttcaaattggtcgggggcaagtactatttagtcagtggtgctgggaaatcagtttccaaatgggacaactattgggaaaatagtctcactcaacatgaaactgagagaataaatgtttaaaacttcaaaagaactaaatacaggtgtatattatttagccttcagtatggaggaggacatccaagcatgaaggtataaaccacttacattttaaaaacaattaatagcttggccacataagagtgaaatgggccagggcgcggtggctcatgtctgtaatcccagcactttgggaggctgaggcaggtggatcacctgaggtcaggagtttgagaccagcctggccaacatggtgaaaccccatctctactaaaaatacaaaaattaactgggtgtagtggcaggcgcctgtaatcccagctactcaggcggctgaggcaggagaatcacttgaacccaggaggcagaggttgcagtgagctgagatcaggccactgcactccagcctgggtgacagagcaagactccgtcccaaaaaaaaaaaaaaagaacagtgaagtgtactcaaaacctgtaaacaaaatttaaaaactggtaaagaactgggaaaatatgttttgtacatatgatatataaacttcaaatgatgggggatggagccgaagtgttttgtttgtttgttttgttttgtttttgagatggagttttgcttttgttgcccaggctggagtgcaacggcaggatctcggctcaccgcaacctccaccccctgggttcaagcgattctcctgcctcagcctcccaagtagctgggattacagtcatgccccaccacacctggctaattttgttttttgtttttttggttttttttagtagagacagggtttctccatgtcagtca[131 bp omitted]ttagaaaagtacaggtgatcaacaacaaaaagcaaatgattcaaagcaatttgagtagtcaggagataaattcgtgttaaaacagtattccttttcttacctagcatattggcaaagataaagaaaaatagcaaatttttaacagagattcaagaaagattggctttttttttttttttttttttttctggagatggagtctcgctctgttgccagactggagtgcagtggtgtgatctcggctaactgcaacctctgcctcccggattcaagcgattctcctgcctcagcctcccgagtggctgggactacaagtgcacgagattggcactttttaattcgctgttgatggaaatgtataagttaaaaaaaaaccttcctctgcaatttttgttttgttttgttttgtttttgagacagagtcttgctctgtcatccaggctggagtgcagcggcacgatctcagctcactgcaacctaaacctccagagttcaagcgattttcctgcctccgcctcctgagtagctgagattactggcaaccgccaccacaaccagctagttttttgtatttttagttgagacagggtttcgtcaggttggccaggctggtgtcaaactcctgacctcaagtgatccacctgtctcggcctcctaatgtgctggacttaacaggcatgagccaccgtgcccagcccctctggagtatcttgatagtatgtgggttttttgtttttcttttttttttttttttaaccgagtttcgctcttgttgcccaggctggagtgcagtggcgcagtctcggctcagtgcaacctccgcctcctgggttcaagtgattgtcctgtatttttagtagagacggggtttcaccatgttttccaggctggtctcgaactcctgacctcaggtgatccgcccgcctaggcctcccaaagtgctgggattacaggcgtaagccatcgcatccggcccttcttttttctttttaagcattaaaaatgtgcatactcgggcatgcgcagtttctgtgggaaaacatgttccttaactaaaaggcagcacatttgcaacaaataatttttccctcaaacaaggacacttgggataggaagaagggcagagctgaggacaggtctgatcctgttcaactttactaagaacctgttttctgcacttctacttccacagctcagacaagaacagaacctcttctgcttgggggtggggcagggctgtcttgtgcggaatggcctcattcctggattaggaagtgttcctaagtagtgaggtgtctcagatgtttataaagtgaccacttgtgtagtgctcagggcattgttgcttctgtaaagtgcgtatcatttgatctcatgctgtaaatgattctgtcttcagggcgcaaaccagaagaagagggtgtggaagataacgggctggaggaaaactctggggatggacaggtatgtgcagccttgcgagtgagtagcgtggtggatggaccagtggcggtcacatgatggttcggtctggttgtgtcacaggaggatgttgagaccagtctggagaacttgcaggacatcgacatcatggatatcagtgtgttggatgaagcagaaattgataatggaagcgttgcagattgtgtcgaagacgatgatgctgataacctccaggagtccctgtcggatagtagagagctagtcgagggggaaatgaaagagcttccggagcagcttcaggaacatgctgtaggtaaccggcaatgtctctagaatgtgccctgaatgtatcagttccacaattaaaataggtgatcagtttcatattgggaagtaagttgttctgtaatgccagttcagtagaataagggtcagttggttcagatgattctgaaccaatttgttttgttgaaaggtgatgtcttataacatttcatatgtacttgctatccatttgcggcatacagtatgagacattttgaggacaaccattcagactcttcctgttgccggacttgatctgtggtgttatggcctaggtaccttgaaagcattgaactaggaagaggttagaagttggtgttttcctgttaagaagcaattgttgagctgggtgccttgatgcactcatgtaatccggtaactcagaaagctgaggtggaaggagcagcccaggagttcaaggctgtactaagctatgattgtgcaattgaagtccagcctgggtggcagagtctgacagaaccctatctcttgtttaaaacaaacaaacaaaaaaaaaaacacagccagttgatacctatcttaagagttaacctcaagtattaacctggatgttgtttttaaacctaaatttttttcctgttagaaacatatcaaatggatagtaagattatagtgggtagtatttcctgaatactacctaccaggcattggcattatgcccttcctttcttttttttttttttttttttttttttctgagacagagttttgctgttgttgcccaggctggagtgcagtggcgcgatctcagctcactgcaacctctgccccctgggttcaagtgatctcctccctcagcctcccaagtgagtagctgggattataggcgcccaccaccaagcccgactaattttcttgtatctttagtagagacggttttcaccatgttggccaggctggttttgaactcttgacctcaggtgatccgcctgcctcagactcccaaagtgctgagattacaggtgtgagccaccgcgcccagcatgtgccctttaattcttctaatagcaacatgaggtgctgttgtccccattttcagttgaggaaattgggaaggcaagaactaaaaaacatctccagatgacacacagctcataacagaataagaactaagatcaggctaattccagaggccatgtacttaacttatgtacgatgttgtcttggtgccattaatttgatattaatttcatttacctgatgattaatgtttgtcagacagaaaaagtgatgcatatgagaagctgtggggccctttctgtgttggctcgtggggggccctgttcttgtcctggtccttaggtcttccgcagtgagtgcttctcaagcagtcttggtggacagaaaccttgttgtatgccagtcaatccgcttctgcatttcttcagaatatttttgcatttcctcttggaactgattccaagtatccttagaggtagcagattgtcatatttgaatggaggatttgagtctgagaagtggctgagagttattctgatacaaatagggtgtgcaatttttggtgagtcccattcatcagcttctaaaaaggagtagcagaaacacttgcacagcagcaggagttacttacccttcctgaatggctgcatcttcttaaggctgtttttttccctcctaagcagaaaatcatacattctgcaacaaaagctggaaacatcctaaatgcctggaagcagtttagttttaagggttgaggccaggtgcggtggcttggctgggcacagtggctcacacctgtaatcccagctactcaggaggctgaggcaggagaatcacttggaccagggaggtggaggttgcagtgagccaggattgtgccactgcactccagcctgggcggcagagtgagactctcaaaaaaaaaaaaaaagagttcagaggtagattctggagatggatcaatttctgtgtgtccctggacaaactccttaacctctgctcctcacttgcaagaggttttcggaagattcaatggatggatgtttattatacacttaaagcagaagtcatcaagttggctgtcacctgggttgtttttgttttgttttgtttttgttttggggtttttttgtttttgctttgttttgctttttttcaagacagggtctcatggtgtaaatgaagttttctgagagcacaaccacacctattgatactgttgtctatggctgcttttgtgctttagtgtcagagaggagtcctgactcatctgttctacaattcctgaagaatttactaggcagctccaacaaagtgtttcccagcctagttcaatgcctagcatctagaaagcaccgtagagttatgaaatgtaccaccacgaatacagtttttactgcagtgtaaccatcaaaatgaattaagcacatctgtgtgaactcaaacaatctccaaaagagaagtgacacttggggagggttcagaatgatgtgctgcccctggtgcagatgtctaaggggagatggtctttggcacttaaacacgtgtgtagcatatgcgatgaccactgcatggcaggaagaaaggagtagtggagagtggttttcagtgaatgggcttttgtaccttttgagtcttctgatcgtgtgcgtgtctttcctagtgaaatatagtgataaaaatacatgctggttataaaatatctgaaaacgtctccccctaagtatatctcaaatttcagggctttagagcagatggccaaaattggtttcagtcacaaattatctgaaccccctttctttgtttggggaatcctttgccttattgggcagagcctacttcttagaataaaagctattcttcccctgcaagtagggcataggatattgccagtctcgagctcctgtcctcaccctcatgctgggagatgctgttccattgagggaggtacctaccccaggggcagcaggtcccacatcctcagcatccaggctgggcgagcagcggtggctgaaggctccacttcagcaggactctagccattgctcctggaagaacagccctcaccctgtgctcagatccacttagaggctgtgcactcattttcatctcttttctgtttgacttagactttttttctttcttttgcatcttaaaacctacatagctaccatattagtagatttcctagtctatgtgcaggtggacatttacatacaacttttttttcagtttagctgcaattatactataatagtgttttgatttctgccctgggtttaaaattttgttgtgaattattttcatagctgttcacttttcattgtacagatgtaccattatgttacgttattgttggtgtgatgaactgtattttctccatttattttacagatagaggacaaagaaactataaacaatttagatacttcatcatctgacttcactatattacaggtaaactgttgtatgtctcagtacttttagaatgaaaggtcagaccacaatttctggaatccatttcagacaccatatgccagttccagctaataatcaccacaagggttgtttcctttgtcaggatcgttaatgggtgtttgctttctgctttcctccaaatataatgtacgcattgccagggacttaactctaggcttcgacgagtggcctccaagcgctgtggcttaccagcagtcattagagtcatgttttgtggcattcttaatttcattgcttgtggcaggggaaggcagcctgtctcatctaccctgggtggcatcccctgcagaaagatgatttgatgagacagcaagagggcatggctacctgggaaagatgagtagggcccagatggggattgagggttgacagagccctgttggggaaggtggggtctcaggggttctggtcttgtctttgggaagttttttttgttttgttttgttttgtttttgttttgttttttctgaaattgcccagatttcatttaatgactgtatcatcctacctgtttcattggcatctctgtaaatattaaatcttagatgagaacagatgagttgagaatttccaggtatgatttttatatttgtgggtcttgagtttcctttttttttccagcctacatagatacaaattgttagaacacacttacctaggtagctggctaattcttaggagaactttttgtggagaaatgaagatcgagccagcttttgcccagcctttttatttatttattttttttcccgtcttctttttaaatgtcatctatgttattgtaattagaaatccccttttggaaaagatctccatttgcttctgccatgcaagggcaagggagatactggaaagccagagctccaaccttgaggagggcacaaatctcaagaaaacgtggtgaaacccagttcgcttttagagctgccgtctctccacctgcaaattgacacggccattcccgactcagaaaggagaggaggagccggatcttgtcactttcccctggctctttcttggtcacagtctcccatgttaaaatgggaaacctacagtctctcctaaacaaataggaatgtatttgcttctctttagagaaaatgaggaagaattattctgccaacattgatgatttgcttcagtcctatggtcagaattcccagcatggggtagggtacatggggaaaaaactgattaaaaataagtgaaagcatgaggaaagtgtacagtttcatagagcatcctggaatggcagggcagttcccaggggaagttataattcagtcacacctacttattgggtatatgtgaatcccctgtgatgtgtcaggtgtggcattaactaccagcattacatagatgaatgagaaggaagggtggtccccatgctcgtggggcctggcctgatggttaacagtgcagactcacactcatacacggcctttgctcagagcctgtctctgcttcccacctgctgtgtgtccttgggcaagttactcagtctgtctggtcacagtctgttactctgtaaaaagaagggtgctaccattaggaccaacctcctgcaaccgatgacgagtctgtgtgtatgtaaggtgcttacatttgtgcctggaacctagtcagtgcccatcagttgactggaattccagaggagtgtaccttgtgtgcacaggaaacataaaggctgggggatcacatcatgtggaaaaagctcctttgcttagtggggcacagctggagttgggttagagggaaatagggaaagccttcctgaaaggagatgccactgagctggatactgagggatgtggatgacttggctggacggggcaggggagggctgggcctgtcagggagggaggtggcatagggatccattggctgaaggctgaaggccacagagggacatgagcttactgtggacacaaggtgcagagagatgggatggggataatacaaccagatgccacagtaggcaaggatggcaccagcctgagtggacagggcttcctgggaagagtctgaatgacttctagaactggcctggtgggaacactgattggaagaggagatgaaggagggagggtatttacaaagtttttcatgctggcaccaccatgccaagtaagagcaggagtcataccacctgggcccatattccctcagtctttcgaatatcagaaagttgtcgtagcttcattgagtgaaaaagtgactgttaatgtgccatgcattcctctagatgctaacagtagaaaaatgaaaacactgctctccttgaatttgagagttcaatctagagggtcaggcgtgcttatgatgagtgcctcaccatgaagtgagaccagttccaggctcctgcaggggagactgaatggagggtgggctgagtgaagtggatgccagtcttatggagccattcctagaacaagcaggttctccacctcttgagtttgtgagtttccctccctggatttttaaaattccctctttagttattctgggttttcatttaaataaactgtaggtgtcattcatctggcacagtcttatttacgttttttcttgcaggaaattgaagagccatccctggagccaggtactgttaaatgaaaaacttaccagcgggggtttggaaccattctagttttccaccttctctaatttgaattctttgatttttaaaagttaccttactatagtatacattgttctaaaggtttacaatccaaaacctaccaggatcatagagattggaaacccagccatatcaccagatctgtgaaagtggctcacttctcattttacaaaatgtattggtgagatgaaagtatctcatgcctttttgaatatcaacagcattgaatcatacatagagaaagagttccagatgcctctcttgagagctaatacctctgcacccacaaaacagatcttgtgatattgggcagtagcttaattttgttgtttttaattgaggcagctcaggtagtggtagggagatacattttaaaacataaatttgagacataactggattccagaagaggaaagagtgtcttcatgagaattccaaacactgttcactttctggactgcaaatatctcagagcacggatggaagagattctggttttcatgttggactgttctgttaaaagaaattcaaagaaatttggaaattgagctgttcagtgaatggtgatacattcagttaagcaacttggactttggaagctaaatttggaagagtcatatctaaacgacgacagaatgaagactgtcaagaatcagccagaaggttttgggggttaaatctctgggatgcttttctcttccgtgtagcgtagaggcttacctagaggcggtcgcggcgcaggtagtgtaaccagtataactttgtgtacccgcgggttttccaatctctgtgtagctagcagttctcttcgtgttagtgtggcagccgtgccagttccacatttgtgattgctttatttccctggtaattaaaccttgtgccattctattcctgttaaatccgtagaaaatgagaaaatactcgacattttgggggaaacttgtaaatctgagccagtaaaagaagaaagttccgagctggagcagccatttgcacaggacacaagtagcgtggggccagacagaaagcttgcggaggaagaggacctatttgacagcgcccatccggaagagggtgatttagatttggccagcgagtcaacagcacacgctcagtcgagcaaggcagacagcctgttagcggtagtgaaaagggagcccgcggagcagccaggcgatggcgagaggacggactgtgagcctgtagggctagagccggcagttgagcagagtagtgcggcctccgagctcgcggaggcctctagcgaggagctcgcagaagcacccacggaagccccaagcccagaagccagagatagcaaagaagacgggaggaagtttgattttgacgcttgtaatgaagtccctccggctcctaaagagtcctcaaccagtgagggcgctgatcagaaaatgaggtttgttttttctcagttttagaccagacgctatctccttttcattggtcatgtaatgacacacataagctgtttttttctgcaattggccagccagactgacgaaattgtagttttgcttctaaagaatgtttcgtttctctttgtgtgtttttaatgggtgattcaattccttttctttttctcaacctaccatggttgtgttcttaaattcttcctaattacctttagcccagcagaattaattaactcctgtgggtctgaaatcttatggttaggtcagattttcaatacaagtttgtcggggtatcattttttcagaactaaatttcgggtaggtatgcaacctcagcacgaattttatggttttgagtttgtttcctccatgctgcttccttgtggagtgacattgtcttttgtctctagttctcccgaagatgactcggatacaaaaaggctttccaaagaggaaaagggtaggtcacctcggcgacaccagtcccttggagcatgtatggcctgggcagtggcgggtatttgattctggttcatcgcgtgctatgctccttacccaggagactcctgagacgtttgtgcagtctttctccttctctgctgttaccgctacaggttctgggttgtaggaagcataccaggtcctaagagttaacaggctgatttggtgcagatccttgtgttgggagcacattcatcctgtaacccttcattaaatgcattaactgagaaataattttaccctaccaaattccttcttaatcagtgttctaaaggagtaaaaacatgggatagatacagagctatacgtggaaagagaaacagtgcattgttgacaccaaggttgactgttctgctacatggccgttgcacactgcacttcctcctgtaattaagcgatcgctaactttttttgagacagagtcttgttctgttgcccaggctggagtgcagtggcgcgatctcagctcactgcaacctctgactcccgggttctagagattctcctgcctcagcctcctgagtagctgggattataagcgcccgccaccacacccagctgattttttgtatttttagtagacatggggtttcacca[137 bp omitted]atagccccactcagtattgtgacgggccctgtggtagtgctgctgggcctggtgttgcactggaggctcttggtgaggatagtggtcaggcccacagccccatttggcttttagtgctgccactgcctcaggaaaaatgggaaccatgtctcttttggaaaggttgtctctaagactcaagatcttgtgggtatttgggtttttactagaattttcttttgaaataggtcgcagcagttgtggtagaaatttctgggttagtggactctcttctacaaccagagctacagatttgaagaatcttttcagcaaatatgggaaggtaagtgccagagcttttctggagaagatactttgaaaccagcgttgtgtggcctttacatggaggtcctctcccctcagtgagttctttgagagataccaaggagcttacacttgctaatggctggggagggtctgcccgtccacaggtagaggtgagagtggtgtggaagcttccagagcccacatcaccactgtatttccctcccttctctgcgagcttgcccccttccctgtgatggctcgtggatccatttctgtgtcctcaggacgtcgcactcaggctgggctgccagggttggctggtggggtgctggtcagcatgtctgggagacagcagtgttcttagaacagtgttcgtgatgctggaactcagaactcagaacagggaccctggagtctgatgataggggtcctcaccacgggtgtcttgggtccattgactgaacctcacctcagcagctgggggctctcaaagttgctgcctcagttcaccactgggggcagttctagtggcctcttgtctgcagcacctgcctttcctgagcccgtgaaggtggggctggtggcaccagccccctacctgcagtgcccagcgcagccgcctggccctcctccctgtgctttctcactcccttcctccctggtgtttcccagacttgcctcccaaacagcctcctgcattcagggctcctcgtctctctcagagtcggtttcggggactaccaaaggaaggagtccaatcctttgtgttacacagtgagggttcaacacattgcaatatagaaaaccaagtgttttccctgatactgacttcgaagaacttaaaagaggataaaacaggctgggtgtggtggctcacgcctgtaattccagcactttgggaggccgaggtgggtggatcacgaggtcaggagtttgagaccagcttggccagtatggtgaagcctgtctctgctaaaagtacagaaattagccgggcgtggtggcgcatgcctgtaatcccaggtacttgggacgctaaggcaggataacaacttgaacccaggaggtggaggttgcagtgacccgagaccgtgccactgcactccagcctgggacagagcaagactccatcttaaaaaaagaaaaaaaaaaaggataaaactaattatgtcattattacggacataactaagggcttcttgagcctcagtgatacaaggtgtgtggctggcaacacctgcgccaagtctcccctactagaccccctttcctgactccatggcgtcccccagcgggtgggtgtgctcagtggggaagtgttgccctggagactgtagtgtcttgagcgcagcaggcctgatgtgggttaattagaggaccgggcctctctgagaatgtcctctgggactaggattccatgtggcatgatgagcatgattaccagcctcggccactggctgctgcagggcttttcctgagccatggtgtcttctgccgtcaaagggcgaccctaactgcatcctgctggagtcgagaaaaccaggtagactggaaaggatgtgtctacagtaactgaaacacatcactgcgttttgttacagtcaatgatagggcagatctgagttccagagcacggctcacagacctttccttgcatcagtctgtgccgaagtcttttttttttcttttttctttttttgcccacattacatcacttcataatttaccacctacgtagcatgactgtatatttggaatcatttcttcacaagttttagaccatattaaaggaacactggcagaaccctgtttgatttccctttcgtctgttcccctacattgccctcctggcccccttgaggaactagatgagcgattagaactggccagaggtccttggaggaacaacagcgaaacagaagcattagtagcattgtcctccccagtctaacacttgtcggacccctgatgagcagacttccctgtggggtgttcatatccccatgccccgctcagtgggcttcatgtctgagtcatatttgcctgctttcctttgaggtggtgggcgccaaggttgtgacaaatgcccggagtcctggagctcgctgttacggttttgtcacgatgtccacagcagaagaggccacaaaatgcattaaccacctgcacaagacggagctccacggaaagatgatctccgtggagaaagtgagtggccgttttcttcccaggatatagcccacattaggaaatgggggtaatacttgattctctttttcaggccaaaaatgaacctgtgggaaagaaaacctctgacaaaagagacagtgacgggaaaaaggagaagtcgagcaacagtgacaggtacccctccttcctggctaaattaaaggggcagggtgttttttgttgttgttgttttgtttttgagatggagtcgcgctctgtcgcccagactggagtgcagtggtgtgatctcggctcacctcaactccacctcctgggttcaagcaattctcctgcctcagcctcctgagtatctgggactaaggtgtgcaccaccacacccggctaatttttgtattttcagtagagatggggtttcaccatattggccaggctggtcttgaactcctgaccttgtgatccgcctgcctcggcctcccaaagtgctcggattacaggcgtgagccaccatgcctggccggggcagggtgttttaaacagaatctcactctgttgcccaggctggtgtgcagtggcaagatctcttttcattgaacctccacctccctggctcaaccaattctcatgcctcagcctcccgatttgcttggattatagccatgcccatttgtggttttagtagagatggggtttcaccatgttggccaggctggtctcgaactcccggtctcatgtgatccgcccgcctcatccccccaaagtgctgggaatacaggcatgagccaccacgcccagccaacatgtctgttttttatagatctacaaaccttaagagggatgataaatgtgacagaaaagatgatgctaagaagggtgacgacggaagtggagaaaagagtaaggaccaagatgatcagaaacctggcccctcagagcgatctcgagccacaaagtcaggtgggcagctcatgagcccaggagattctgtcttgtttctgtgcctagtggagtttgttagtttgctgtgattagctggcaacggaaactggattcatgttgcagagggtttttctcatctgggtattcttggttttccacttacactttccccgtcttttctgtaggaagtcgagggaccgaacggactgtagtaatggataaatccaaaggggtgcctgtgattagtgtaaaaacgtccgggtccaaagagagagtgagtattaattttctaactagggtattttgctcttcttttcagtttgtatttctgtgtgcgtcttagggaattactaagcttcatttgaaaaaagcttttgtcggccgtttcgaaaatgtagaaatctcaaactattttttttgagacaggttctcactctgttgcccagactagagtgcagtggtgcgatcttggctcactccaacctccgcctcccaggctcaagcgattctcctgcctcagcctcccgagtagctgggattacaggcgcacaccattatctttttagtagaaacaaggtttcaccatgttggccaggctggcctcgaactcctcacctcaggtgatccgcccgcctcggcctcccaaaagtgctgggattacaggcatgagccactgcgcccagcctcaaattattttaagaaatgcagaaagctttcctttatccttacttttgctctgataactgttaacttattttctaaagctaactttaaaatttacatatgggactgttggcttttccctgagtcggtgtgtggcagtccacgttccctgtctaccctgaaagtgtcagcacctccccgtgatgcattcctacacccagcagtgtggagcatgccatggtgacctggcccatctcgccagcctccctctagcctgctctccaccttgaccccttcctgtactcttatcttcttgctgggctgcagtgtgagctgagcatggtggctcatgcctgtaatcccagcagtttggtatgctgagctgggaggatacttgagcccaggagatggataccaccttgggcaacatagtaagaccccatcttcacaagaaatttaaaaattaggcaggctcggtggtatgcatctgtggtcccagctactcaaaaggctgaggtgggagaatgccacttaaacctgggaggtcaagactgtagtgagccacgttcattgcactgcactctagcctgggagagagagtgagaccccatctcaaaaaaaaaaaaaaaaaaaaacacacacctattatttgcatggtctgtgcacaccgagccacccttactggttaactgtcaactggggacactctgagagccaacttcccagttgccagccaaggaccaatcttggcagcagcccctccttaaggaaggagagggaccttggacccgcctggtcaaccctcagctgcacggaggaggaaccatttcacttggtgaatggagcggattgcttaggagctttcagtctctgtgtgccagtattataatatgtcatagccttttacccttgttctataaaacacctttggaaaacggaaaaaggaaagtgtgggttctagggataaaatgagaaggtctcttaacaatgtcattggcacaaataaggtacttgtcaagtgtaccggaagtgcttcatttgggaactcattgtgtgtttaattattgaaggaaaaaggaaaattaagaaatttatttttgaagcaaaagacataaaaaattggtgttttgatcttatatgaagttttcgggggcaatactcatttccattttttctctattaaatgtactgttagatcatattttagcattaaatgttgatgaaattctgtgtctttcaattatgataagcaaaatgtaaggcttgtttggattaaacagctcatctgtttttcactaaaagttattcatcacataggacctccacatctgatggttaggcatggatatatatacctgattcttcctgttcccctatcacacctacttttaacttttttcatttttttattttattatttattttttatttgttattattattttttagacagtctgactctgtggcccaggctggaatacagtggcacaatctcagctcactgcaacctccacctcccgggggtttttaagtgattctcctgcctcaccctcttgagtagctgggattacaggcacctgccactatgcccggctaatttttgtacttctagtagagacaggatttctccatgttggtcaggctggtctcaaactcctgacttcaagtgatccacccgtcccggcctcccaaagtggtaggattataggcgtgagccactgcgccagcaatttttttttttttttttttttgtcagagtatcgctctgtcgcccacactggagtgtagtggcgcgtcctcggttcactgcaactactgcctcccaggttcaagggatcctcccacctcatcctccaaagtaactgagattacaagcatgcgccaccatgcccagctaatttttattttttatttatttatttatttttatttatttattttttg[233 bp omitted]agcctcccaaagtgttgggattacaggtgtgagccactgcgcccggcaatttttatatttttagtagagtcaaggtttcaccatgttggccaggctggtctcaaattcccaatctcaagtgatccacccgccctgaactttgaaagtgcttggattacaggcataagcctccgtgcctggcctctgctttaactttttaatgttctttggtgaactaggcttccaaaagccaggatcgcaaatcagccagcagagagaagcggtccgtcgtgtcctttgataaggtcaaggagcctcggaagtcaagagactcagagtcccataggtgagtagggatccaggaacggtttggtgtttttcctagaatgtggtcatgactgtcttctggaaggatgtttgcagagttccctggggtgggatagagctgtgaacctttttgctccttcagctttcagttcatagacttgttatgttttaactttcatcctacggctcttttcttttcttttcttttttctttttggagacagagtcttgctgtgtcgcgcccaggctggagagtgcagtggcgtgacctcggctcactgcaacctccgcctccaagcaattctccagcctc[134 bp omitted]tggcctcccaaagtgccaggattacagacgtgagccactgcacccggcctacttacagctcttttcaaataagtctcttcccaaagattgtagaaggtaacaaaggcagggagatggaatgccttccagcgtcagtagtgctcgtcaacaaaaaataccaaatttgctccagaagatgtgaaagcaggaagagagacagtgaggtagacccagcgagggcactgagagggcttcctttttttttgagatggagtctgtgtcgcccagggtggagtgcagtggcatgatctcagctcaccgcagcctccacctcccctgttcaagcagttctcctgcctcagcctcccaagtagctgggactacaggcgcaagccaccacacccggctcatttttgtatttttagtagagatggggtttggccatgttggccaggctggtttcaaactcctgacctcaagtgatctgcctgcctcggcctcccaaagtgcagggattacaggcatgagccactgctccaaggactgacagggcctcattcttaaataagtcaagaagtaaacacaaacgttattggcgaattacagctaatttattttttctatgaaatacttcgttaactttagttttaaaagtaaggacccccctgggcgcagtgtctcacatctcagcacttcgggaggccgaggctggtggatcacctgaggtcaggagttcgagaccagcctgaccaacatagtgaaacgcagtctctactaaaaatacaaaattagctgggcatgtaggccaggcgcg[138 bp omitted]gtggcgggcgcctgtagtcccagctactcggtaggc[224 bp omitted]aaaccccatctctactaaaaatacaaaaattagccaggtatggtggtgcgtgcctgtaatcccagctacttgggctgaggcaggagaatcacttgaacccaggaggtggaggttgcagtgagccgagattgcgccactgcactccaacctgggtgacagagcgagactccgtctcaaaaaaaaaaaaaatcagctgggcgtggtagtgcatgtctgtaatcccatatacttgggaggctgaggcgggagaatcgtttgaacccagggggtggaggttgcagtgagccaagattccaccattgcactccagcctgggcaacaagagcaaaacgctgtctcaaataagaaataaggacaattagtttaaaaggagggggagagggcactgctctgcctataaagttatcacccttttattcccttttttttttccgagacggaatcttgctctgtctcccaggctggagtacagtggcacgatctcagctcactgcaagctccgtcccctgggttcacaccattctcctgcctc[181 bp omitted]ctattcctttaaaaagaaaaaaaaaaaaaacaaagtctcccatagtcctgtgagtgcaggcattggcaggtggcatttctgctgggggagtaatgaacacgggcagcctggggggcccccacaggagcctgccgtgctaaacactagagtgttccagaccctaggcccctctccatatctggcgtagaggaacctatgaacaaggaagtgtgggcttgggtatcccgtcaggttgtgagcatttggacacaactgaaaagttcccataaaccgcagccctttcatactaggggctcctccggaaggtgctgagatccacagaggcaggtgtgggcggatccaagacatgttgggtgaactaaggaggttgcagtcatttgagtccagaacactatgaggcaagattatacatttctgctgggacagaaacacacagttgtcccagaaacgactggcctcagtacccttgtggataccaaaatttgcagaggatcaagtttctgatataaaactgtgtggtatttctgcatataacccatgtacatcctcctgtacactttaaatcacttctagataacttctaatacaatgaaaatgctgtgtcagtagttggtatactgcactgaggtgctttttttttttaagtagctccctgcacacacctttttttttttttttttttttttttttggagacagggtctcactctttcacccaggctggagttaagtggtgcaatcatagttcactgcagcctctacctcctggtttcaagtgattgatcctcccacctctgcctcccaagtagctaccacgcctggctaatattattttttctggagacggggtctcactatattgtccaggctgtatatctataactgtgtaggtaaaggatcgaaagaagaaaatctgagcctgggcacagtggttcatgcctataatcccagcactttgggaggtggaggcgggcagattgttttgagctcaggagttcgagaacagcctgggcaaccatctctaccaaaaaaaaaaaaaaaaaaaaaaaagacagcctggctcctgtctgttctgttttatatacaaagactggagaaatgcactaaaatgtcatctgtatccaaaagatacagctgctaatgtccttacacttggggggcctgctagccccacctcacaaagactcatttcatcctgtggtctagggagtgaaggttccaattcacactcactcgctatgaagcatatactctgtggcttttttttttttttttttttttttttctgttgccgggctggagtgcagtggctcactgcaacctctgcctcacgggctccagtgattttcctgcctcagcctccggagtagctgggactacaggtgcgtgcgtgccaccatgcccagctaatttttgtatttttagtagagacaagagtttcaccatgttggccaggctggtctcgatctcttgacctcatgatccacccacctcagcctcccaaagtgctggcattacagatgtgagccaccgcgcccggcctgttgcttatttttgactggctgtttcctgaaatcacttgtcaagctccaggaaatgttggagaaaggaggcccagttctgatcacacacacacagcctgggcctcactcctgagatcttcctgggctgctcctgtgggcccgagaagccttcttcccgctggagtgtacggttctgcagaccacgtagtggacgcacagccctggagtctgtgcgacccagcgtcttacttaaagtcagccctgggacctggctgggggtgtctaggtccccttctgcagctctactgttgtgcagcagggtgcgtgaacgcagtgaacgcgaacaacgcatgcaggcgcagtgggagcgcgaggagcgtgagcggctggagattgcccgagagaggctggccttccagcgccagcggctggagcgggagcgcatggagcgggaacggctggagcgcgaacgcatgcacgtggagcacgagcgcaggcgcgagcaggagcgcatccaccgtgagcgcgaggagctgaggcgccagcaggaactgcgctatgagcaggagcggcggcccgcggtgcggcggccctacgacctggaccggtaagcagatccatgctgcccttagcacgtggcgttcagaatcgtgttagggacctcacagtccagttagcttgagatttttttttttttttttg[132 bp omitted]cacctctcccggctaatttttttgtattttcagtagagacggggtttcactgtgttagccaggatggtctctatctcctgacctcgtgatccacctgcctcggcctcccaaaatgctgggattacagctgtgagccaccgcgaccggccagcttgagatctttcattcaaaggaagcataggccgggtgcgctagttcacgcctgtaatcctaacattttgggaggccagggtgggcggattgccttagctcaggagttgaagaccagcctggccaacatggcagaaccccgtctctactaaaatacaaaaaattggtcgtggtgacaggcgcctgtaatcccagctactggggaggttgaggcaggaaaatcgcgtgtacccaggaggcagaggttgcagtgagccaagatcgtgccactgcactccagcctgggcaatagagtgagactcggtctcaaaaaaaaaaaattagagacaggaggctggataaagtagtgctggttaactaaccaggttcaagggtggcacagacctcctgaggagggaagctcaggcacgtagagagcgccacacgtgccctactgcacctcctttaaggccctttcctttttttttttttttgagatagagtctcgctctgttgcccaggctggagtgcaatggcgcgatcgctgctcactgcaacctccacctcctgggttcaagcgattctcctgcctcagcctccctagtattcgagattacaggcacccaccaccacacccggctaatttttgttttttttagtagagatggggttttgccatgttggtcaggctgatctcaaactcctgacctcaggtgatccacccacctcagactcccaaagtgctgggattacaggcgtaagccaccacccccggccttgtcctggctttttaaatccattgtaatttgtttttgcttattctagaaataaagaattaaaaaaaaatttttttttgagacggagttttgctttcgttgcccaggctggagtgcaatggcgtgatctcagctcactgcagcttccgcctcctgggttcaagcaattctcctgcttcactctcccaagtagctaggattataggcatgtgctaccacacccggctaattttttgcatttttagtagataccgggtttcaccatgttggccaggctgtcaaactcctgacctcaggtgatccacccaccttggcctcccaaagtgctgggattacaggcatgagccactacgcccggcagtaagattaattttaatttctcaaacatactgaagaggaggtatgaacacaaaatgctgagcatggctgctgtgaggagtcaggtgtgtaattccagcagtgattgtgtcaggctttacacgtgcactgcaacctggcaaaaattgctgtttgttgtttctttctattgcatgggttgaagaggagcccaggtcatatatacaatgcaacttctataaagggccttgtaaactgttctaggatctattatgctttggtacgaaatccttctgatgacagttcattatggtcatctgtgtattgcagcagtacatggccagggctgctggcagggcaggaggtcagctttggggcgagagagatggcaggtgcacttgacagagcccctcggggtggaggctcacgtggtcttcctgagcggaggtggctgtgtagggctccagaagccatctgcaggcagcccataggactgactgcttaactaatggctccctctttggaaaaccgaggccgcttttcatcaggggaggtgggtgcatgggacaaaacaaaacaactgtgcagtcactggggtcaaatcagaccttgcctcctataggagagaacactcttggtgaaagtcatcctggttctgtgaagtgctaggggccagctcccacaaaggtgatagatacatttggggtgggggatccctctatctctgtctcatgtcccctcacaggcgagatgatgcctattggccggaagccaagcgggccgccctggatgagcgctaccattctgactttaaccgccaggaccgcttccacgactttgaccacagggaccgcggccgctaccccgaccactcggtggacaggtcagttgggcccctgctgggcgtgcgggttttctttttcctggctcattctgactgagaacaaggactcctgggctctctgaacccactccgttcatcagatgtatgctgagtcagacccgcaggtctcctgccttcagttagggaaattatgcttttcattgggggcctgatggtcctctctttgtgaacaagcctcttcttccccttacggtttgatttaaattgccttttcaggagagaaggttcaaggtcaatgatgggagaacgagaaggacaggtaagtctgaagctacagtggtagccacagaatttcccatagaatgggttcttttcccttcagcgtgccttcttcctgccctttctttgagcaagaggcaaaatgaggaaagagaaaagtaaagcactagaaaagtctaggtttgtggaatggaaatttgggattatttggggttagtcttggctgtcagtccaaacagttactctgaagctgtttttagccttgaccctggggttctgtgtgccacactcaccacacatgtgcaacagtgccagggaaccttgggatgtgacctggctctgctgggaagtgtctagtgagccgcacagctgactcagacaggtgcatctggggaggctgtggttgctgtgtctgtcctcgagtgcctgccctcttttgaaagtaaggacatccttcatcaccccagggcccagcttagccttggaaaacaactagatctgtggtctgtgctcattctcttcgggggctagcacattagaacaataagctccattttctccttccatcttacattgagactgagacttcccaggagagccttggacctctagtggctttccctataaacttgggggcagcacattgctgtgtggaagatgcctcctctctgaggactccactcatgagcccttcctcctcctgccagcattttctggactccaccataagcttcccgcttctgtcccccttggttccttaatgtggctgagcatagccaagtactcagctctgtctcgggatcctcaggaattccatcagcctcgtggggttcctttttccctgctcctggaggcaaattatatgcagcaaaacgtagaactagtcttgtggattttctttggtggaggagcatacaccaatggttccatgtaaaggctccagaatcagaactggcgtcacaccttggtgtcaccccttcctgctgagcctgtctccccaggagtgaaatgagggtaatattcctcctacaaagggtgcggtggtgggggtttacatgaggtgggcgcatctgtacaaacgtgtttatcattgccagctacttttttttttttttaatagagacgggatctcactatgttgcccaggccagttttgaactcctgagctcaagtgatcctcctacctcggcctcccaaagtgctaggattacagatgtgagccagcacacctggccaccagctgctttcatgaaggtgttagatatgctctcctaacagtggaacgcggtttgatcccttctcctcacatacacagtcataaatgagtcgtcagagttaccccaaagggaaatggtaacatctccctacagagaaaactagcacagaacttatgggcctcattgaacagttacgtgggttggttggacagaaaaatgttggttcaattttcaaatactaaggagagcttatttcaggagtcccttttcttactttgttgaggggaggcatcagagcacatgctgggaggataggccaggaagcaggcagtggtaacgtgggacatcgtgcacgtggtggagcatgccgccatctctcccttcaccctggcagagctctccgttgaacggggaggtgaacttggacatggacaacaaccagcctgtgtcaagggggtttccttaccaggactcctttctagtttcctttcacctacaatgtggtcatggggcaaaaaccccagagaccacatatgtattggtggaaagagaaaaaacaggactgtggagccaaagctacctcactagcttttgtgaaagtcaggctggaaagtgcttccagccacagaaataggctgtgggtgtaaatattaaccttggccatcaaataagtaggcatagagtgtgactcgccctctcttggtcttccctgaaacagcagggtcaagaactcctggtctgtgttagccacgtggcttacaaaaacaatgacacagaagagggaaaggtgggactagccaagtggaaggccagccgtttatctctcagtgtcctgtgtcttatatcctgagcagagcaaggtgcaagaccctggactgggcatccagcagaaacttccgagaaacttgactgtgaggaaggatgcttgcctagcaattggtcggatgaagggctccatttgatacttccttcactgtggaaggaagaaatttgtaaaaattatttccagaatatgcacacattaaaggtttataaacctgacctttctttagtagaagacagtaagagaatactgttggctctgggaactaaccatttgagctgtgggacccagggaatctctcttgtaagcatcatctttagtgggtgactcctggtggccctcccagctctggtggtgctgtggggacctgccttggagatgccttggtactagtaccttttttgtaccaggccatgagcctagggcacagggcctctggcctgcagatttcaggaaggcagctgtgttgtgtgaaccgatacagcctgccagcacttctgtcccgagtgactgtcgttgtcatcgttagcatgttgcctgaaaagccttggggtctgggcgctgacactgaagcttttttttcccttctggctctgtgatgtccagcattacccagaacgccatggaggaccagagcgccacggccgggactcccgcgatggctgggggggctatggctctgacaagaggatgagcgagggccgggggctgcctcctccccccaggtttgtgtcccacacccgacagtacctgaccccccccccgcccacaagggggcccgcaagtcgctgggatgtgggcacagggtgggaaacacagagggattcactctccagaagccgccacagttattagcacaagagccagagatgggggcaatccaaatcagagatgtctctctttcaaggggcagacgtgactggggggaccatggccgaagagaggatgaccggtcatggcagggcacggccgacgggggcatgatggacagggatcacaagaggtggcaaggtgaggagcagctctgggctgggaccaggatgtgctggggagtgatggaaagatggaggccgcgccttctctccttgggggagcacaggaggtgctctgctctcagtgctggaatgaggaatgaagagcactccagacaccgcctgctctctggtggtctggcccaggagttggacagtgggcgttcccgagttctctctgctgggaggaagctggacgtctatggtccctgtgcccaggtgtcttcctgggacccgctagttgtgggtacctgggggcctcaccaaagggagtggagtgggctaaatgtgccgtgggttccacgccgtgtgcgcaagttccctgtgtgaaagcacgtctgtcttccaggtggcgagagaagcatgtccggtcactccgggcctggccacatgatgaaccgaggaggaatgtcagggtaaggcatgctgggggcggcgccccttccccctgctttgcatattggcctaccttgctggaggcttaacaaccaagtccttccagctagtgcccctccccccaagggtgacgtgaggccaggcatggggtactgtggaggctgctgccactcaggaggggagggcattaggaaggggccctgcctgcaggcaacactcagggaagctgtgcaggctgggatgggccggggagcaggaggacttcgcagtcaaaccaatgtgaatttgttcctaggcgcggcagctttgccccaggcggggcctcccggggccaccccatcccacacggtggcatgcagggcgggtttggaggccagagccgggggagcaggcccagcgatgcccgcttcactcgccgctactgagtacttggaatcctgtgtcctgtctcgtggcaacaaggctatgttctgttaggagttaccttaaactgtgtaaaaatatttttttttaatctgctgccatattgtagctcaatacaatgtgaatttgtttttcgttttggggttttttttttttgtaataaatgtgtttccgttcacataccctttatttaaagtgtcatttctttatttctgcctctttaaatgaaacgaaattagacttttagttgtattgatatacactgattgttcctttttttaattattattattatttttttttttttttgagatggagtctcgctccgccacccaggcctgagagtgcagtggcgcgatcttggctcactgcagcctccacctccagggttcaagtgattcttctgcctcagcctcccgagtagctgggactacaggcgcctgccaccacacccggctaatttttatatttttagtagagacggggtttcgccatattcgtcaggctggtcttgaactcctgacctcatgatctgcccgccttggcctcccaaagtggtaggattacaggcgtgaaccaccacgccaggccgactctgtttatttttaaatatgtgtgaaacctctgggaaggcatccgggtgtggaagaggctttccagtgagacagtgattggttttcgcataatgggcctgtgcggtgcaggttttgcctgacttctcaagtcaccgagttctcctttaatgttagcacagaccgggctgctttgctcttgggtactgggtggcatccctgtcagggtgtgggggtctcaaaccctgttgatggacactggcggatgcttcccctgcggatcacactcgaaccaagcctgcgaagatttccagctgccactctccacactgacttgccaaagcccaggcaccatcatcatgtggatgcttccgcattacctttttactcagaggacaaactattttcacggcagagtcgggtggaagcagtgaaggctgaaggtcatcagcagcatctcaggcccgaggcgtgcttgtgcacaggctcagccccctcgtgccaggatggggctctgaccagcccagggctggcctctgtgtcagccggaagggacgagcccaacgccaaccctccacacaccagcagcaagctggagccacggcatctgggatccagcacctgtcctaatccaggaagccaggccagacttgggacatacctcaaactgtgaagcaagtgcctcccccattttgtaagcctcactgtagtggagagcggggaggaagcagtgtccagcagagaggaagacggcggagccccagtaacgctctagggtcccttcagctgcaaaggacagatgaccccaccaataccagtggtggcttagatggtaaaggggggccctttcctgccttaacgggaagtttgtaggtaggcagttcccggggctcactgcagcccacctcaggctctgtttctctgaggattttgggactctcatggatgatggatggctgaaacagctccaaaaatcctatccacccacagtgtgggcatcatcggggctatccagcaggagaaggaagggcaggaacggggacttgaactcacaggcctcttggcaaacttacccctgaggctccttagccagaactcggtcctgtgctcgcctttcttgcaacccgtccctggcgaagacggaatgtttctcttcagaagggatgtgacatccgggaaggaacccagtggtaacccccagcaaccacgttctcagccttcccctcgtacctttttttttttttttaaattcaagctgttcacattctctgtactttttttttttttttgagacagagtctccctctgtctcccaggctggagagtgcagtggtgcgatctcagctcactgcagcctctctctcctgggttcaaacaattctgctacctcagcctcctgagtagctgggactacaggcgcccaccaccatgcccagctaatttttgcatttttagtagagacgggttttcaccacattgggcaggctggtctcaagctcctgacctcaggtgatctgcctgccttgacctcccaaagtgctgggattacaggtgtgagccactgcactcggccccattttttttttgagccatatgcagttgtgcatgccagtaatcaatcccagctacttgggaggccaaggcagaaagattgcttaaggccaggagttaaagtccagcctggacagtataccaagaccccatttctttgggttttagggggtattttttgaaataagaaatgacgggctgggtgcggtggctccggcctgtaatcccagcactttgggaggccaaggtgggtggatcacctgaggtcaggattttgagaccagtctggccaacatggtgaaacactggctctactaaaaatacaaaaattagctgggtgtggtggtgcacgcctctagtcccagctactcaggaggctgaggcaggataatcattttaacccaggaggtggaggttgcagagccaagatcgcaccatcacacactgcagcctgggcaacagagcaagacttcgtctcaaaaaaaaaaaaaagaaatgaaagaaagaaatgacagattccactagcagagagagatgaggtctgtgaacatctggggcatgtccctacagactctttttttttttttttttttttttttttttttttttgaggcggagtctcgctctgttgcccaggctggagtgcagtggcgcgatctcagctcactgcaagctccgcctcccaggttcacgccattctcctgcctcagcttcccaagtagctgggactacaggcacccgccaccatgcccagctaaatttttgtatttttagtagagatggggttt[132 bp omitted]tcatacattcctcccaggtgtcattatcagccccagttaacagaagagaaaactgagggcacagattggacactgtacctgtaagaaccaaatgcccacagcaatgattctaaaccctaactgcatcacctacatggacctacgaatcagaatctatggcagttatggagttctctagggccgctgtaacaaattgctacaagctttttgtgtgtgagagacagtctcctgtcacccaggttggagtgcagtggtgcaatcatagctcactgcagtctccatttcctgggctcaagcgatcctcccacctcagcctgcccagtagctgggactacaggtgggtgacaccacacctggctaatttttgtatcttttgtagagatggggtttcatcatgcccaggctggtcttgaattcctgggctcaagcagtccgcctgccttggcctcccaatgtgctaggattccaggcacgaggcaacgcaggcagcccagtctcctaggcaggagagatgcctcggagtgcttctccccggccacagtcttgagtcatttgcatgggatgttctacttctaatgcccaggcagcacccttgctgtcctgctacacagggaaggacggggattcagccctgctgtcagccaggcactgagctgtacctgctcttccccaccatcctcaatataaccccgggaggctgtacaaccccattttgcagacaggaaaactgatgcctagcagggtgaactgacgagtgaggacaatcaactggcagtggaaaagatccaagcttcgaaccacccattcattcaactcccatttccacagcccgcctctcaagcagggtccccggcactgaccagatgtgttcacacaacagacccaatcagtgcctgccctcaaggtgggcacacgtgcatgtggtgagcttatgaagtgcagcttaggccaggcgcagtagctcacacctgtaatcccagcacgttgggaggccaaggcaggcggatcacaaggtcaggagttcgagaccaccctggccaatatggtgaaaccccgcttctactaaaaatagaaaaaattagccaggcacagtggtgggcacctgtaatcccagctactcaggaggctgaggcaggagaatcgcttgaacccgggaagcggaggttgcagtgagccgagatcatgccactgcacgccggcctgggcaacagagcaaaactccatctcgaaaaaataaaaaaggccaggtgcggtagctcacacctgtaatcccagcacttcaggaggctgaggcaggcagatcacttgaggtcaggaggttgagaccagcctgaccaacatggtaaaaccccatctctactaaaaatacaaaaattagccaggagtggtggcccgcgcctgtaatcccagatactcaggaggctgaggcaggagaatcgcttgaacccaggaggtggaggttgcagtaagccaagatcacgccattgcactccagcctgggggagaagcgcaagactccatctcaataaaaggaagtgcagcttcatggtacaggttgccctggccacagaaggaatggaggcgtttcctggctgggggaacacactgaaggctctgaggccaacaggagcaaacttgtgggagaaactgccagaaggctgtgggggaagaggggaatggccacaggggacagcaccatgtatttttaacactctgggagtgaaaagtctctggccatgggctacttggtggtctcttgaggttgttctatacagtaagaggagtcttttccctccaaatctggtccccatccttacacgtgtctccaggaagcagctgaagcccaggtcccagagggatagaccttgcccttagtttcagcacggcaacgtacatgagtgtccacttcggcctgcacctcagccagggaaacgtcttcattgttggccgtgcctctagtggcagccagcccaacaatgctaggctctccccaacagcaggccttcactggcaagactctctgaaccaagatggaccattgctttgtgggtaagtggagtagacaaaccagtcctcatacatccatccaccagcgcattcacccacccacccatccatccacccatctacccacccacccatccatctatccacccacctacctacccacccacccatccatccacccacctacccacccacccatccatccatccttcatctaatccattcatctgtctacctacctaaccacccacccaaccacccatccgtccatccacctacccacctacccatccatctatccacccacccacccatccacccactcgtctacccaccacccatccatccacccgtctacccaccacccatccatcctccatctaacccatgcatcctccatctaacccatgcatacctatccatccatccacccaatcatccaaccacccacccatccatccatcctccatctaacccatgcatcctccatctaacccatgcatacctatccatccatccacccaatcatccaaccacccacccatccatccatccattcatccatccatccacatacccatccattcatcatccatccactcacccaccccatccatctaccccattcatccacctatctatccatccattcatccacccacccagtcatccatccatccatccacccacccacctatccacccaatccacctacccacccatctaccccatcatccatctacgcactcacccatgaatgcatgcatctacccatctaaccactcatcccatccactcattaatccatcaagccattgactatactcatccattaattcatccatgcttactaatcatcatctttttattatttttttcttttttttttttttcgagacagagtctcacactgtcgcccaggctggagtgcagtggcacgatctcggctcactgcaacctccacctcctgggttcatgacattctcccgccccagcctcccgagtagctgggactacaggtgcctgccaccacgcctggctaattttatgtatttttagtagagacggg[136 bp omitted]agatgaagttttactctgtcacccaggctggagtacagtggcacaatctcggctcactgcaacctctgcctcaagtgattctcctgcttcagcctccccagtagctgggactacaggcgtgtgccatcacgcccggctaatttttgtattttttttagtagagacggggttctgccatgttggccaggctggtctggaactcctgacctcaggtgatccacccatctcggcctctcaaagtgctgggattacaggcatgagccactgcgcccagcccatgcttactaatcatcttccataccccaggctctatgctggggtttgggaacacgcctactattaacatatggtcccttccctcagggagcctgcatcctgttgagctaagtcacacaaacgcaaactgtggtgcccaaggagaagaaaaggtgctgaactgtgcctcagaacaggggcatggtgaccctgcctgtaggagaggagtctgccaggatgaggacgggaggggtcttactctcctgcaaggtgagatgaggcagggtgtgcagggacctggtgcccctggaatgcagagatggtgtgggggttgaggcctggaagttctctcccagcctcagcctcagcctcagcctcaaggaaaccacccctccccttggcctgcctcttccttcttccagagaccacccctggggatgaaggacaccagccctccggtggcatcagtgccaccagaggccagcagaggggtcagagcacagggcttccactgttgcctctgccatcgcctgcctccaggtaagttcttgcagttttctgagcctccgtttgctgacctgtaaaatgaggctactgagctgctcttaggatttcgggatgaaggcgccatcacagaactgcattccctctccctccagctccaaaaactgaattccgccaaggcgtagagcagctcttaagcccaagttcactgggatcactactgaaagtgacaggaggcagccaagtgtctaggcagatagggacaggtcccagtgaaaccccaccttcaagccaaaaatagcccaaaagctgaaagaccagactgctggtcctggaggaaacccaccacccagagtgagaacttctgttcctgtttgcccaccctttcctggttgattctttctgaacaatgccttttaaccagtcgaatgttgccctttctgatactatctatggcctgcccctcccctattctgagcctataaaatcctacatgtctactgacagcaaactcatttccaggaccatgttagatgggaagacgcgtggctgtcagctgcttcggttgtcaccttgtcctttcagatttaattaaaactggctgctcagcactcagcccacacggggagaagccaggttgccgctggcccgtatggcaccggatggatggggccaaaggtgggctgaacatgctctgggctggtaccatggagaccctgagcccagcatccccccagtcagggttggggaccctcagggctcacgttgctcctggttaccttggctttattattaagagacagggtctcactgtgtcacccaggctggagtgcggtggtggagtcatggctcactgcagactcaatgtcccagtgatcctcctgcctcagccggggctacaggcacatgccaccgcacccagctaatcacctccatttctgctgcacccaccattccttgggatggcgagttagcactcactccaggccagggccgggcaaagtgcgctcaaggctggagcgggaccacgggcagctgtggtgacagctgaaaggaagggcagccactcggtgtcccccacgccccagccccagctggcctccgcctatggactccccctgctctctcttctagctctgcccagcccacatcgtgatgggctagctttccctggactccgttcctagcccgtcctgcttccagctatcgagtgaccccagctgtcaaatggcactgtgccacatgccagccttgccttgctctgtggtcttggctgtgggtgtggtcaggtgtttccccagccccttcccgccttcccaaagtcacccctagacctgcctcagccacctctgctttctggagctccacttccatggccccccaactcccctgaccccaggcatgttcttgcacacaggtgccagtggatgggtgaggacgaactcatgggataaagcctgtgaccccagggaagaactaagccacattcgtggagctgcaggacccggccgcctggatggaggggaggggccagaaagcagctgctcactggcctcgtccagtccttcccctctaacagtgacggtaacaggtgtgaggctgcagaggcctcctggagcggacggacgccctctggcccagccatggcatcacagcaccgagtgcaaacccctcctgtcctcacaggctggggctggggctggggctgggtgcctgggtgcgaggcgactagaaattctgcatcccctgcgagggtttgtggtgaacagcctgggctccggacaggctgggcagacagaactgtctgtctgtgcaagtttcttcgtctgtaaaatgggcctgcagtctgctccttcctgggccttcgggaaggacttggtggacagtgtcaggggacagtgagtgcgtgggtgctccggcgagcaccggcttcctcctgcagcactgagggtcagtgatgctcccctgccctgctcatccctccctcaccctagacctgcccccaccactgctaaggcccagtaaggacaggggcatatcagatgtgggggacctgtcccgggaccacgctcctggggggaatggggtgggcaggccctgtggactccccttctaccagactaggccgctgctcccagccacacccctcctacgccctgctcaggccagtggcttctcctctctgagtgggacagtgggggagatgccccggcctctagtctctgctcctctcctctgtaacagctgtcccctcctaagctcagttccctataccaagcaacataaacccctgaactcatgggaacggggaccctgtcccagctcggtgagcatcacctgtctgctccctgctcccagggcagcatcctacggaggcctctggccccacccaagctccccaccacccccatgtgtctggagccaccagactggtttctgggcacaggcctcttgccatcacccaaccccgtggatcgccctctgtggctgggtgctgggagcctcccagggctcatgcctgatgcgggggaaccatgcaggctgccaggtagcctggccagtgtgcggcaggggtgtcagggaaggcgtcccaggggagaggcaatgtccgggagaccctctgaatggcaacaaacacctggatttccttcaatgaccaggattcccctgctagggttgtcgggagagggtggaatgagggtggagtccggccaaggaagggccgggacaggactgcggacaggagctgaggagggcaggaaccagtggccctgggggctcctgccctgtgtcccgcagggaagcagaccccacttctatccactctggctcttccactgtcctaccctggtctcagccctccaaaaccaagaccctccacaacccaggcttggccaaagcactttcctggccccagagcacagcctctggagcaccgggagcagccgctctgacctctgactccccgcaccagagcagacggcaaaggggagtgctatggcctgtggtcaaggtcaagccctgacaagccatcaggagccagaagcccaggcctcggtgctctgggcaccaccaggccaaccctgtgctccctggggccagcacacgggtcagggaacacttctgaagtcctttattgggccggcaaggccgggagctgccctcggagtggggtcccagtccggagtcttcaggtcagtggcagccctgcccgttctggccggggcaggcggcccctgctgactcgctacttggtgcgcgccttcacatactcccagccctccttggagtactcgcgggccttggagggggccaccgacagagctgacatcaccgtcatgatgcctgtgggaaagggacggccactggtgatactcccctcccagcctcacccagcctccaacccctgggaaactctagagtttgttttgggcggtggggggtgggtggggggcggggatggagtctcactctgtctcccaggctggagtgcagtagtgcaatctcggctcactgcaaccttcgcctcctgggttcaagcgattctcttgcctcagcctcccaagtagctgggactacaagtgcgccaccataccaggctaatttttgtattttatttttttgagatggagtctcgccctgtcgcccaggctggagtgcagtggtgcaacctcggctcactgcaacctctgcctcctgggttcaagcaattctcctgcttcagcctctcaagcagcagctgggattacaggtgtgcaccaccacgcacggttaatttttgtatttttagtagagatggggtttcaccatg[136 bp omitted]aggaaggaggatggacagaaaggaatggccaggaagtggggagaggggctagactggggtgtctccctccaagcaaagaaactgggtgccttacctgcattccaggagtcacggatgggaaagtaaatctttggaggggctgggagctgggaaaaagagatgggcagaaagaactggtgaaaaggctcagcagcccatccccagaggcggagggaggaggacaggccggagaatcaggtcagcatcaatatggaggacaacatcgtgcagggctggagggacctcccagagctgaccacccgccaaaccctggcctcgttcccggcccgtagtacctggggtatctgcaggcctgtctgctgacacacgtactggctgaactggtacatggcgggggggaccacctccccagccttctgtagggctgcctggctcttgtcgctgggccccagcagctcctggtcgtacaccaggtagacggcgcccccagccacacttcccttgatgaggaacctgcgggcagggacgggaggagcagaagctcagcggacactgacagccaccctcaggggccaaggcccacggggagagtgagaccctcctgagggctcaccgtccacagggtgacactctgtagtgcagcaccgtcgacccagacccctattatatacagcactcgttttacaacgtgcaaggcagggcggctggacgccacttgaactgatgaactgaaacccagagggggagagtgggtcactcaaagtcccacagtgagcaggggcagtgaagacgtaagatcttgaccttctagaagccttccagccctggagaaaccaagtgtccctgggcgcctcctgcccgctgtcactcgcagctccgagcacgcattcacttctcatccacgccagcggcaggattcaccggcattcccacctcacagagaagacaactgaggctcggaggcggaggctgacaccgcgaactgaacgccaagggctcgctgggaagcaggagggaggggattggcgacctcgggaagccccgcccctctgaagcctcagtttccctatctggcccataggcggggaacgaaggggaagtgactctaagggaagcgaagagcagatcgggaccagactggagacagggatgcccacaaaaatggactttttcggggactcgggtcccctccggcgcccccacgcacctcatcagcgaccacacccgggccaccatggtcgctcggatccacgcgcaaggacactcggctcgcccgccgcttcctgtcgcggcgccgcagaggcctctggaaggtgtagtctttcttgcccgacgcaaggtcctctgggagtcgtggtgtcttgcggctctgagactccagagaagggctgcggtctcgcagcggagggccgctgggaaatggacgctttaaggcccgggccgccgcaaggctgtctgggaaatgtagtcagcacggcgctgtttgcacctggccgcggagcctcctgggaaatgtagttcggcccggccctggcaccgtgaggggaaagaggcgtcaggtgcctggctgaagcctgaaggtgacccgaaaacaagtcagagcccgagagatccacccgcgcccgcgcgggggaccaagggcccggatttaagaagagtgtgcctacaaggcggttgtcacggcaacgagagggcgggattgttcgagcgctgcggccccctcacgtgatcgattcggaggcggggcgtccgcccagtgggcggggccgggcccctgctgggaggcgaagaccaggcgggcactgttgcccggcgacgctccggcgctgggtccccgaggcccggcccctccccgggaggaggtgggcttcgagtcacgtgacccgtgccctacgggagggggtgcggtcggggacccggcaggaggcggccgagaagagaggaccgtgggggcgttcgcgtggctcccagcccgggaccccacccccgctggacagtgggggaaactgaggcctgagcgggtgagtgcacggtttaggggtgcgcagagggtcacacgcccgctttgttcagaggggaagctaaggcccgccgaggtcaagaaggggccgatgcgttctgcagggcttccccccatttctcccgcatttcggccgggctgcttcaaccgttcatctgcccatccatccatctgtcccccacccgtctatccatctggccatccacccatctatccttccatctatccatccacacttccgttcatccatctgtccgcccatccattcatccatctgctccccccatccttccactcatccatctgtccacccatccatctatttatctggccacccactcatctatccgtccatccatccatccatccatccatccatccatgcatccgtccgtccatccatccatccatccatccatccatttatgtgttcccatttatccattcatacatccatccactcatccatctatccacccatacatctctccgtccatcatccatccatccacccatccatctattcatctggccatccacccatccatccttctatctatgcatccatacatgcatctgtccatctatccattcatccatccacccatccgtccacccgtcagtccatctggtcccacttccccctgccgggctgctgcagtcagtgtagagctgggggtggaaagagggatgagcagaggagcttcatgggctgtccctggaaggggaaaaggtggaagctcgtttcttgctgtgggcatgcctggtgtgtctgggaaaggtgaggagttcattattttgagaactgaacgattcatagatggggccgtgggagagaaggatagacaggtagtcaggggctatacctgcagggcctcatggggtgcagtgaggagcctggtttccatcagttgcagtggggacccctgagagggtttggagcaggaagggccatggccatgttgcttttgacacagacgcctttggctgcattgacagaagaggcagggagagaatgagtatggacatggggaagccagtgtggaggtgggggagaccaaatcggagatggaagggaggccaaaggaaagatgggggtggtcaggcccggggtagggtctaggagggaggtgacaatctgggagtcctggagagagagaggaagggacagctggggagagactggagagggagaactgataagatctgaaaaccatgagctcgtgggggtgaaaggatagaaggaggtgaggacaatacctgggtctcccatttagggacaggggatagtggggctatttctgtgatggtgagctgggaagagaagcaggtatggggtgacatgctgagcctggattgggtcctgctggttctaaggggcctggaggttgtcaggaggagacacccagaagacagcagaggcaaagaacctagggctggacctacagatgggagatttagggactcctcaatgatccgctccatctggtctgtctcagcttcctggttctggaagtccccttccccttgtcccattgacttttttttttttttttttttttttttagacagagtctcactctgttgcccaggctggaatgcagtggggcgatctcagctcactgcaatctccaccccgctgggttcaagcaattctcctgcctcagcaggagaccccatctctacaaaaaatacgatgattagttgggcgtgctggtgcacccacttgtagtcctagctgctccattggctgggatcacaggcatgtgccagcatgcccagctaatttagtatttttagtagagactgggtttctccatgttggtcaggctggtctcgaactcccagcctcaagtgatccgcccacctcggcctcccaaaatgctgggattacaaagtgtaatcccagcctgtgcaacaagagtgaaactcagtctcaaaaaaaaaaaaaaaaaaaaagaacctggactgtttctctctttcaccttctccctggaattagtgaatcagctcccatagctgaaatcataaatcatatcttcatctggatgacgcaggcacctctgtctccaacccagccccatgtgtcaaatgccttctgggtgtctccagagagcgagctgtctcttggcttcctcacctctcgcctcccacgtgcctcatatcactccatgatcaatctggtacctattgagcacctactgtgtacctggcacagttttgggccctgaagacccaatagggaacaaagtagaagatttccatttccttcctgcccttatggagctgatggtctacagggagagaaggatggtggaacgagtaacaaatggtccttgggctgggcacggtggttcacacctgtaatcccagcactttgggaggctgaggcgggaggatcacttgagcccaggagttcaaaatcagcctgggcagcatagtgagaccccatccctacaaaaaatacgatgattagttgggtgtgctggtgcgcccacctgtagtcccagctgctccattggctgaggcaagaggattgcttgagcccaagaggtccaggctgcagtgagctatggtcgcaccactgcactccagcctgagcaacagagtgagactctgcctcaaaaataaaaaaaaataaaaataaaaaaataaataataaaaaaaggaggccctcacttgaaggaggtcactgttctttttttgtttgtttgtttgtttttgatacggagtttcgctcttgttgcctaggctggagtgcaatggcaaatctcggcacactacaacttctgcctcccaggttcaagcgattctcctgcctcagcctcccaaatatctggattacaggcatgtgcgtgcctcagccccctgagtagctgggattacaggcgcctgccaccgcgcccggctaatttttgtatttttaatagagatggggtttcaccatgttggccaggctggtctcgaactcctgatctcaagtgatttgcccgcctcagcctcccaaagtgctgggattccaggcatgagccaccacatccagctgaaggaggtcacttttgcactgagacttgaaagaagtgagagagcaagccattgggttatatccgggaacagcattctaggcagtaggaacagcccacgagaaggccctgaggcaggatagtgactggctggtttcaaggaacagcgaagggtctgttttagtggagcggagtgagcaaggaggacaggtccacacagggcgtttgtagccaccaaggagtctggtttttattctaactggaacaggaaggattttcagtccaggagaggcaaggtgtgcagatggagagggctgagaagggtggagggggagggtgcaggtgcggtggttcatggagccgcggtggttcatggagccaccgtggtggcctggacaggtggtggctgtggaggtggataggaaggcgtggatccaaggcggtggcatcaccaaacacccaccaaacacgggtggctgtgggccaggcctgtgccggccacctctgtcccctgtccctctgcaggcccacacaggaccatgaaggtgcttctcctcacagggctgggggccctgttcttcgcctattattgggatgacaacttcgacccaggtgagcacctggggttgagggagggagaaaccgggccagctgtcctgtcctccgcccagagtgaccaccccggctatggccagccagcctccagggagcgcgagtgctgctgacaggggccaacgctggtgttggtgaggagctggcctatcactacgcgcgtctgggctcccacctggtgctcactgcccacactgaggctctcctgcagaaggtgagccaccccatgtctagatgaatggtgggggtgctcatggggggtgggaagagagcctgggtttaatccctgcaatgatccaggcttcccgtgtgaccttgggcaagtcgcctaacctctctgagcctctcagtttcctcatttgcaaaacggggacaataaaaccactttctggccaggcacggtggctcacgcttgtagtcagcactttgggaggccgaggaaagtggatcacctgaggtcaggagttcaagaccagcctggccaacatggcgaaacctggtctctactaagaagacaaaaattaggccaggcatggtggctcatgcctgtaatcctagcactttgggaggccaaggcggatggatcacttgaggtcaggagttcaaaaccagcctggccaacatggtgaaaccctgtctctactaaaaatacaaaaaataaaaataaaataaataaataaaaaattagccggcgtggtgtcaggcacctgtaatcccagctactggggaggctgaggcgggagaattgctggaacccgggaggtggaggttgcagtgagctgagatcgcgccactgcactccagcctgggtgacagagcgatactccatctcaaaaaaaagaaaaaaaaaaattagggcatggtggcgcgagcatgtagtcccagctacatgggaggctgagtcaggagaatcacttgaaccccggaggcagaggttgcagtgagccgagatcgcactactgcactccagcctgggcaacaaagtgagactctgtctcaaacaaacaaacaaaaaaacccaccttctcatgggttaggatgttgtgccaatgcagtgagacggtgactagaagatgcagtgtttcttaacaaatgagagtattgagtgtccaggcctgtgctgatagccagggttcttaaactcgaagggaaggatgggcacttcttagcaacaagcagtccattgctacttcaaggaagggtatggctcttgggcacaaacctttcaatatttcaagagaagctagcaatcaggaaattgtagatgaaatgtcctgttttagatgttggtgattgactaaccaccaaattggccagcattctggcccgcgggcctccactttgcgcccctcaagcagtggtaaatttttgggaatgatgttgaatgggtcccgaggctcagagtaggggggggttttcaggcgggggcctccctatggccagcaggtgcggtggagggggaagcgctgctgtagaggagaggcccacgggcagctctggccccccccaggtggtagggaactgccggaagctgggcgcccccaaggtcttctacatcgcggcggacatggcctcccctgaggcgcccgagagcgtggtgcagtttgcgctggacaagctgggtgaggggctgggcctgaagcctggagtccgggaccgtggcctaggccttagggacaggaccagaattgggctgtgggtgtggccacagtaacaggtgtctcagggcggagacaaatggggactgggggcgtgggcggggtggagtctcattgcgtctgggggaagagctctgaacggggcctcgttgaatgggaaccaaaccttgctagatccagggtgtaaggccaaggctgggtgtctttgatcgtagtgggagttacctggggcggagctcgctggaccagcgctctgggtggagctaagctcgggggcggggtttgatcgtttccttggggaggggcctccggggctgaccggcgtttctgggccaggcgggctggactacctcgtgctgaaccacatcggcggcgccccggccggcacgcgagcccgcagcccccaggcaactcgctggctcatgcaggtgctccgctcctccgcggccccggcccgcccctctatctcagggaccggtggtccgttcccttcgcggtccgggttctgccttctccagggagggctctccacccgtcccgccccagccacgcccctcctagcccaagcccctgctccggccttgaccccgccctcggacccgccttccgggtttctggccccgtctctgacccggccctggccccgccctctgggtttctggccccgccctgcccctgggctccgcctctgccggtgactcgcgagtgccgcctgcaggtaaactttgtgagctacgtgcaactgacgtcgcgggcgctgcccagcctgacggacagcaagggctccctggtggtggtgtcctcgctgctcggtgcgtgcacccggccccggctctgcgggacggggagtggggagctcgatgcgggtgagcctggagggtctgggcaggcttcccggacgagggggagccactcagccgctgccgtccgcgcccccaggccgcgtgcccacgtcgttctccactccctactcggcggccaagtttgcgctggacggcttcttcggctccctgcggcgggagctggacgtgcaggacgtgaacgtggccatcaccatgtgcgtcctgggcctccgagatcgcgcctccgccgccgaggcagtcaggtgaggcccggacaagctgggggctgggctgggggccatggcccagccccagccgcagtccccaccgtgccctcctgtccccaggggagtcacgagggtcaaggcggccccggggcccaaggcagccctggccgtgatccgcggcggcgccacgcgcgcggccggcgtcttctacccgtggcgtttccgcctgctgtgcttgctccggcgctggctaccgcgcccgcgggcctggtttatccgccaggagctcaacgtcacggccgcggcagcctgagcaccggggggtgcccctccagtcccagacggcaatgttcctccctccaactgtccctggagccagaacactcacagagacacccctgagagggtggccacagcccaagatgaagtcatcaagacagaaaagcaaaaccgagaaaaacgacgggcacctggaaccagtcacggcttgggaggtgcaggtgccccgtgttaggcgcctttgtcggggacttgcaaggcctcacctgtttggccatgattgatgacgtgactgcttccattttgcagatgaggaaactaaggctcagagaggccacgccacccttgagccacccatggacccctctccatctcctgcctgcgcctttaagtccctgatttattctttccattcattccatctgggaggaacccccccaactcctgccagcttcccctagctggggtctctggtactcttcacacctgcaggggcgtctacactgttcgtctacctggtggcagggtctgagcgggaggaggagggaaagagtgtgttctgagctggacccagcctcttgttcgagaataaaaactcttcttctcttgcatatctgttgttcaaattccttggtaattccaatttgctagcagccagcgggcagcgggagggggtgtgtgtatcaggggccttgactctcaatcccatttcacaggtggggaaatggaggctgagagggccaggagcagtggctcacgcctataatcccagcactttgagaggtcaaggtgggcagatcacttgaggtcaggagtttgagaccagcctggccaacatggtgaaaccctgtctttatttatttatttattagacggagtctcactctatcgcccaggctggagtgcagtggtgcgatctaggctcactgcaacctctgcctccggggttcaagcgattcttgtgcctcagcctcccaaatagttcagattacaggtgtgggtcacaacgcctgactttttgtatttttagtagagacggggttttaccatgtcggccaggctggtctcgaactcctagccttaggtgatccccctgtctcggcctctcaaagtgctgggattacaggtgtcagccactgcacccggccacaaacaaatattttaattaaaaaattagccaggcgtggtggcatgtgcctgtggtcccagctaaggaggctaaggcaggaggatcacttgagccctggaagtcaaggctacaataagctatgattacagcagtgcactctagcctgggcgacagagcaagaccctgtctggaaaaaacatgaaagcgctaaccctaattagagcagccctaaattgagactctcttcttgtatattagtagcattaaaggagaaaaactggaaacttgtgtgtttctgccacccgattcagttatttagcgtcccgtccctacaccacctaaattacatcagatgtccgcaaggggcactattacacgttgctgtattcagacctagtctag[131 bp omitted]ctgcctcagcctcctgcgtagctgggattacaggagcatgccaccacgcctggctatttatttatttatttatttatttatttatttattgagacggagtcttgctctgtcgcccaggctggagtgcagtggcacgatctcggctcactgcaagctctgcctcctgggttcacgccattctcctgcctc[134 bp omitted]tcccaaagtgctgagattacaggcgtgagccaccgcgcccggcctaatgggcgttttaacagttcatacagtttggtattattattcccgctctacaagtgaagaaattctgagaggtgatgtcgtcgatgcagggtcggcccgaaataggcggagttgggattcgaactcatttcacaggcagagggaggagagcagccatagccacctccactggttccgactccagctcccgggctcgcaggagtaaacgcgcatgctcagggagctcggtcgcgcatgctcagcgcaacggcggggaagactccagccgccagggggagcgcgtgccgttcttgcctctctggcctgcgcctcctgagccgagtagatatcccggagttccgcgcggcgccagcccttccgccacggccgtctctggagagcagcaggtaagtggtttcccgcactgccggtatccgccgccatccggactcccgggtcctctgtgcaggttggaggatggttggttgtggcgagcgaggctgaaggagccgggacgcggggctctgggcctcgggaactgagccggtactcacctccgccccttctccccgtcgctgtccgcagccatggccctacgctaccctatggccgtgggcctcaacaagggccacaaagtgaccaagaacgtgagcaagcccaggcacagccgacgccgcggggtgagtgcgggtgccgcgcggaggttgtcgggggtttcttggagggcggagggcatggcttgggcaaaggctctcgacctgaaagaacgcgcgttcgggcgcagaactaaggggggcttgaatggaagagatggggtgggggagtgggacttcctgcctggtgctcgaaggcgggcacccatctgggtttttcccaaccgtgcaatccacgctggggcagagggagcaccttgagagcggcgcggggcagcgggtttggggttctgacgcaggagtaggagttcgctcatggagctggcccgaggttgcggtgtgtgaggttgagggatttcaggtgtgtcagtgtattgggcgcctttattaagcgggcagcgggtttggggttctgacgcaggagtaaggagttcgctcatggagctggcccgaggttgcggtgtgtgaggttgagggatttcaggtgtgtcagtgtattgggcgcctttattcagcaggcagcccagactccaggtgcgtcctgccagtgttgcggagactgggacttagggaggatgggagctgctccgggcgcggcgaaaagcgctaggcgttaataccttggttctcacagctacccacagaggggaggaagtagccagggaaatcgcggcagcgcgagagaagctgcttaactagaatgcagggatccccctaccctgacggccgcccctttcccccctagcgtctgaccaaacacaccaagttcgtgcgggacatgattcgggaggtgtgtggctttgccccgtacgagcggcgcgccatggagttactgaaggtctccaaggacaaacgggccctcaaatttatcaagaaaagggtaggtgggcgctgccggccgaggggcggggtgggatgggagtcagggccgggctgacggcggcctcgtccctggcaggtggggacgcacatccgcgccaagaggaagcgggaggagctgagcaacgtactggccgccatgaggaaagctgctgccaagaaagactgagcccctcccctgccctctccctgaaataaagaacagcttgacagaagccctggctctcctgctgtccgtgggtgggtgtgggtgtgtcgggggcccgcagtcccctgtctggtgcccgctctgagccacaccctctccgggtgctgcctggtcgtgaatcaaaagccgtggcccgcccacccttcccggggcagcaggtgaggaagccgccgtactgcaaatgactttaatcattaaatagcttctatgccacactctgattaagccgactgaggtccctgggatctgggtcactggaccgagctgctcgctcggtggctccactgccaggtccgggcgcgctccccacagcgctcagttctggcccagacagggcctgacatccgccgcctgcagtcccggggtggccgtcaccgttccacggccagcgcctctgcctgctcgtccgggaaggcgatgtcgaagatctcccggtagtgttccacgaagtgcacctccaggccctcggtgatgaaggctgccaggtcgtagaagtccttcttgttctcggctggcaggacgatgcacgtcacccctgcgcgcttggcctgggggcagagtcagggtcagccctgcctgggcctgtgggagggcagcaggtgtgctaacctccaggaacgaaagggcttcctggggaccggcgatacacagtgatgccgggttctaagcagtaagtcccaaaacccaccagggtccccgtctcccacggggaaacaggctcaaggcaaaaccactggccttggctccaacagcctgagagcaggagccagggcctccccacccccttatctaggaagtctggccgtgcggtgggagcagtctcagggctctggatgagccacacacccacggcctcacatccagaggtcaggcagtgtctggggcctgaacagggttcctgtgagcatctgcatctctgcccccaggccctgcgtcacccccctcacctccggaggctacacatatctggagtagatgccaggcacagccccaccacagccccttgaaaggacagcagttcccactgtcaccgcacactgactccatggacagtgagcctcccaatttgcctccaccattttatcatctaggaagtctgtgcctggtgtccaattcaaggtggtcacagccacttgaccatgcctccctcgtggtggcatctcctgactgactgcaccaggcttcctagacacatggcaagtgtggtccagtctggggacaggcagggatgggagggaagagtggggacagtggcgctccaacctgctcagcacccttggaagaggccagcccctggccaggggctccaaacacccccgccaccagtaatcctaaacgtcgtccccatctctagcctctcccttggcgctgggctgcctgggaagagaagcaggagccacccccccaatcctactggggaagccagtggaggctcagaatgttctccacaagacttgctgtggagaaggcagctagggcggtgagcttaaggccagctccaggccagagagacctgcttccaaagcccagggcttccctctccttggcccaggcagaggttgcatggcggggactgggcctgtcccgtggtggtgtgggccctgccagtgctgtggggtgggtacagggacactcaccgcaatggtcttctccttgatgccaccaacaggcaggatcttgcccgtgagggagacttcgccagtcatggccagattctgccggacaggcctgcccatggccagggacagcagggccgtgacgatggtgcagcctgcgcttgggccgtccttgggggtggcgccctgtggaggcatgtggggatagtgggtgagcaggtggccagcagcccagggactgggcgggagcaggtgggagcggatggcgcggtcacctcgggcacatgcaggtggatgtgtgaggtcaccaggtagtcattggcgggggcgtgctgcatgaggaaggctctggcgaaggtgtaggctatgcgggcgctctccttcatcacctcccccagctggcctgtcacctccaggctgccatccttgtcacccttggcatccttgtcctgtggccgtctcagggatgtctccacaaacagcgtggagcctcctgaaacaggtgtggagctgtgaacacgggaggcctcggagcccaggccggtgctcactccacccctcggggccactctgaccgctcctgccccagtttagcatcttggtgcccctgggcaggggttggtgtcccatcgtgagccaacgctggcctctacgtttgctgcgttgcgggttcctggctctgtacgccccacagggcagcccccagcagctgccagccacagaggacacgcccagggctacaaggcccagctgccgctgccctgcagacagacacaagcccttctccagcccctcccgcaccatcccctttgccctctcgcctcctttgtgcgtggtggccccaaggcccatctggatgagcttgtccttacctgtaagcctatcaaagtggcacccaaatccataaggcccatggtgtgctgccacccccatgtgtcacagccttcccctccctcagcccagaccccctgggctcccagcacaccaccccccgccagaggccgttcagagccacctgaggcccactgcacaggtgtacaaggtgggacctgcttgttctcgggtagaaatgggaatggctttggggtcttctcccgccaccacgctcacccattgcggtccaggccagccccatgaccacgccgggcggtgtcacgtcatacatgcgctccacggtgaacacgggcttccccacgaagtcctgcaggttctcgggcgtcacctccacggactcggcctcgccgctgacaatcttgtaggccgatttccgtaacacctgggcggtcagggcaacacaatgggcacgggaaggtggggtgacaggtgcggggtggtggggtgacgggcacagaaaggtgtgacgggcgcggggtggtggggtgatgggcgcaggaaagtgggatgatgggcatggaaaggtggggtgatcagcgtgggatggtgaggtgggcggcaggtgccaggagggcgggctggccgctcaccttctccacttgcttctgcaggttgcggacaccgctctcgcggcagtactgcttgatgagcagcgtcagcacgtccgatgacagcttggccttgctctcatccaagccacacagggcgcgagcctggggcaccaggtagcgctgcaagggcaaccgtcagggttgggtctggagggaccttgcccaccagctcagtctagaacctgggagccaatgcctctcccatggcccccagaccctggcctgggaacgaggtccctgatggtgaaaccagggcctggacaccccgccctgccacccaccatgcccagaggccccaggcctttgcttgtgctgcgtcctctgcttggatccacttcctatcccccaatggtatcttagatgccgcttcctccaggaaggcctcctggttgccccatgggctggccccatacacagacccagggcctgtagggtggctgactggttacgtggctgctgccctcagcacatgaggaaggggactgggtcaggggctccagggtcacccacagccccacacaattcttgccacagttctgagctctaatggcatgggggagggcatctgtgagacggacagagccatgcaagccactctacatctgccactgatactggggggcactcctgatgccctgaggggtccccatgccccccagtcctgtccccaggaactacaggcccgtcccttggagaagtcaggctgggaactgggcccagcagtgggcattgaagcccccaggggacacgaggatgctgggagggcctcaagggcagggaccagtgcccaccactggctgtcaaagggctcctaggggagaaatgcactcagcacctttgcagaaaaaaaaacacatgagaaatatgggcccctgcatgctcctcactgaaaccacttctcctccaagcctcattctgggtgggagccacaggccccactgcttccggctgccagaaaccttccctacactctgggccaggtgggggccccaccatggggcagcctggaggccccgggagacagagtgtgtggcctgacggtggtgggcggtgttttggacagtcccaggccctaaaccctgcgcccactcgcgccacctgcagctgctcgcaagcgtctggtgtgtctctcacggccccatctgctcctcggccgcaggtcccacctgtctctcccgggcccaggagctcccagaggcacggcctctgcaggctctggggggcgccccctgctctgggaaggggacagcagtggggaggggctgggcttacctccgcaatggccagcttctcctgggccacgtagcccgacacgttgatcatctccatacggtctcgcagcggctcggggatggtgtccgtgacgttggccgtgcagatgaacagcacctgggggcggcggcaaggtgctgggggactggccgcttaccctccccagcaagcccaggccccagacaggccccccaccttggacaagtccacgggcacgtccaggtagtggtccaggaagttggcattctgctctgggtccagcagctccagcagtgccgacgacgggtccccctggtagcctcggccgatcttgtccacctggggcagcagacagcaggtggtgcccctcgccgtgcccctggccagcccgcccagtggggagaccccagggtcagggctggggagaccccgagtgagagcggcacccacaccctgccttggacgggcagcctgctgggcgtggctgtgggtgggagggacccgtccgtgccatcagggccagcatcacggcgatggcccctgagttggctcggggatcctaggacccggaaggctcggcttcatcttgcacacggcattgccgggttagggggtctccgggcctctccgcacgcacctcgtcgatgaggatcagggggttctccgtcttggtcttcttcaaacactggatgatcttcccgggcatggcgcccacgtaggtccgcctgtgggtgcacagcggggtcagaggtcacttggtagcctggctcggccacaacgacaccatgcaccctccagggccacaggggagaggccacctggagccccacaagatgtggccatgatgtgggaggcggaaatgctggcagccgccggatgtgtggcacctgcaggcacgctggtcacttgccctgactcgccagctcagattctggggtcactgattcaaagccagatctccctcagtcccatccctcagctgacaccatggtgaaagccagacaggcgctggcagcagaaggcccccactcctcactgagggacgccaggcacgcctcagccctcaagggctggggtgatactagccatggccagcactggctctcaggagggcttcctgcaagctctgtgctctgccccagcacaggggcccggcccgcgacagggacagaagaatcccaggccccacgagagacagtgaggaaggctctgtctgtgggatgaagacacagggaggcagggatggagggactgagatgccactgggatgtgtgtgacactttaagtgtgcaggggggtaaggagtgtcttagggagaggccccgagcaacgcacgtgaggagagagccacgtgagggtctgagagatgtgttccaggcccaggacacagcccgtgcaaaggccctgaaacaggaccacgcctggtgtgttagaagaacagtgaggaggccatgaggctgaggcagagggaggagggggggagagaagagggaggagagggggaagagggaggagatggagagggaagggggtagagggagggggaggaagaagagagggagagagaggagggggtggggcaggtcatgcggggtcctgtgggctgcagtgagaacttgggctttgaccgaggaacgtgggagccctggagagctgggggcaaaggagggttttgctgctgttaataacaacgatccatcgccccgcagccagtctcctgtccttgtccttgtctcaggaacccagagacgtcagcagacgcctgccctccccgcagccccgctacctggtgactccctcccaaggccagaggtgacccaggcttgttcagaaccccgccagggtctctcctccggcccgcacctccagccatccctgaaccaggctccaagaggcttcgcgaccacttcaaaccgcttgcccaggaaggactgggtgccccccacccccacccctccaccttcacccagctgctccttcctgctcagaccccagcccaaccaagggcctgcagaacaggtcccctgtcctccccctcacaccccccaccccctagtcaatctgggactccccaaagctgcactggccccacctcctccagctcctcccaactcccggctggtcagagtggccgccccctggggactggacactgcgcgggccagcatgctgtcacccttgcagcgggcgggcagatgctaggaaggcctgagccgggaggtcgggagctggggatgtttttagagaaggcagaaatgttcactttaaacctggactcaagtgaatgccttgcaggatggaaacacgtggtggactcagcagatgcctcacactcggctctcactgaggctacggtttccaaagaaccgctgtctacagaggctggcgaggagggaagccccagaaaagccgcgcccggctgcccacccaaagggtcaggtgggagggcgctgaactctgagggccgtggcccctgcttctgggcctgaggctggccgggacgagtgagcccacagaggcgccaaggtttctctggtgtgcgcggcccggtcctcactggagaccgtctctcctgactccagcccacaggcttcggggtggggggtggagccgaccccacccctagtcctggggcatcagccacagcccacatagaccagcatctgcacggcaaacgccggccctgcagctctggcccgggcattgcaggtcctatgctggaactaccgggggtgtctgctgagggccggcccgagaagtctctctcccaggggtcaagccatggaggttcctgccagcgctgtttgagcacctggaatcagctgggcctgaagtccgccacatggctggacttttcagttactccagcatgagtggaatcggttgcccacaacccggattgctctaccagatgttaaagggtgaccggagaagacgaagcccggcagcacagctgaggggagtgcgtggggagagctgtcaggccaggcctacctgtggcccttgatctcagccacgtcagtcatgcccccgacgctgaagcggaagtactctcggttcagggcgcgggcgatggagcgagcaatgctggtcttacccacgccaggggggccatagaagcagaggatcttgccctgggtggagccgcggagctggctaacggcaatgaactcctgcagacagaggcaggttcagtgggcacgtgagctggggaagccggggacccgcgcatgactctcgccacctgcacactgcctttcagacgtctgagggctgcgagaagggaccaggattgtccgggaggctgagcacatcagagctgccactggccacggggaggggcagcctgtgacaagggctccatttaacaatttaacaccaaaggacaactaggtgctaggagaccgcggccacccggcagtgccaggcccgttcagcagttcccgggaccctgaagaccgcaaatgctccactctctccggtccaacccagagaagcagtccaccaatgcctctggctcctgttttttttttttttttttttgagatggagtcttgctctgtggcccaggctagagtgtactggtgcgatctcatctcactgcaacctcagcctcctgggttcaagcaattctcctgcctcagcctcctgagtagctgggattacaggtgtgagtcaccatgcctggctactttttttgtatttttagtagaggcgaggtttcaccatgttggtcaggctggtctcgaactcctgaccttgtgatccacccgcctcggcctccccaagtgctgggattacaggtgtgagccaccatgcccaggctctgactcctgttttttaacctttgactcccacctgcctgcctggtttccaatgtctcaggagtgatattttaaaaattaatttaaaattaattaattttcagacaaggtctcgctctgtcacccaggctggagtgtagtggtgcatcacagctcactgcagcctccacctcccgggctcaagcagtcctcccacctcagcctcccaagtagctgggactgcagacacgcaacatcacaccaggctaattaaaaaaaattttttttcctttttgagacggagtttcactcttgttgcccaggctggagtgcaatggcacgatctgggctcactgcaacctctggctcctgggttcaagcgattctcctgcctcagcctcccaagtagctgggattacaggcatgcgccaccacgcctaactaattttgtatttttagtatagatggggtttctccatgttggtcaggctggtcttcaactcccgacctcaggtgatctgcatgcctcagcctcccaaagtgctgggattacaggcatgagccacagcgcccagccgcaattttaaaattttttgtagagatgggggtctcactctgtcacccaacctgatgtgcagtggcatgatcacagctcaccacagcctcaacttcctgggctcaagtgatcctcccgcctcagcctcctgagtaactgggactacaagcagccccaccatgcccggcccgtcaggcatgacttcagtccacctgggaaatcctcgagccctcgggggcagggcaggatgctacctccgccgggatccccccgaccagcacccccaggcctacgaattcaccagggggctcctttgaaatctcaacccacagcacacaagagtcctgggcccgggcacccacatgcaaatccacaacaggccagacactgggctcaccaggatgcgtttcttgacgtcctccatgccgtagtggtcttcctccagcactgcctgtgcccgcgccaggtccaggttctcgttgctgtacttgccccaagggatggacgtgagccagtctaggtagttgcgggtgacactgccaggggacagatggagagatgctgagtggagctcacgagctgcctgtctctctgctggacttggctgggtggttgcaaggggcttgaaacccatgtgtggggctgagcgcggtggctcacgcctgtaatcccagctctttgggaggcccaggtgggaggatcacttgagcccaggagttcaagaccagcctgagcaactcagcaagaccccatctctataaaacaatttacaggccaggcacagtggctcacgcctgtaatcccagaattttgggaggccgaggcaggcggatcacaaggtcaggagatcgagaccatcctggctagcacggtgaaaccctgtctctactaaaaatacaaaaaatgcttctgcctctgcctctgccctctgcctctcccctttccacggtctcccctttccctctttccatggtctccctctgatgccgagccgaggctggactgtgtgctgccatcttggctcactgcaacctccctgcctggttctcctgcctgagcctgccgagtgcctgcgattgcaggcgcgcgccgccacgcctgactggttttcctatttttttggtggagacggggtttcactgtgttggccgggctggtctccaggtcctaaccgcgagtggtccgccggcctcggcctcccgaggtgccgggattgcagacggagtctcgttcactcagtgctcaatggtgcccaggctggagtgcagtggcgtgatctcggctcgctacaacctccacctcccagccgcctgccttagcctcccaaagtgccgagattgcagcctctgcccggccgccaccctgtctgggaagtgaggagcgtctctgcctggccgcccatcgtctgggatgtgaggagcccctctgcctggctgcccagtctggaaggtgaggagcgtctctgcccggccgcccatcatctgagatgtggggagcgcctctgccccgccgccctgtctgggatatgaggagcgcctctgcccggccgcgaccccgtctgggaggggaagagcgtctctgcccggcagccctgagaagtgaggagaccctctgcctggcaaccgacccgtctgagaagtgaggagcgtctccgcccagcagccaccccgtccgggagggaggtgggggggtcagccccccacccggccagccgccccgtccgggaggtgaggggcgcctctgcccggccgcccctactgggaagtgaggagcccctctgcccggccagccgccccctccgggagggaggagtgggggtcagccccccgcccggctagccgccccgtctgggagggaggttggggggggggtcagccccccaccaggccagctgccccatccgggagggaggtggaggcgtcagccccccgcccagccagccgccccgtccgggagggaggtgggggggtcagccccccgcccggccagccgccccgtccgggaggtgaggggcgcctctgcccggccgcccctactgggaagtgaggagcccctctgcctggccagccgccccctctgggagggaggagtgggggtcagccccccgcccggccagccgccccatctgggaggtgtacccaacagctcattgagaacgggccatgatgacaatggcagttttgtggaatagaaaagggggaaaggattgagaaatcggatggttgccgtgtctgtgtagaaagaagtagacatgagagacttttcattttgttctgtactaagaaaaattcttctgccttgggatcctgttgatcggtgaccttacccccaaccctgtgctctctgaaacatgtgctgtgtccactcagggttaaatggattaagggcggtgcaagatgtgctttgttaaacagatgcttgaaggcagcatgctggttaagagtcatcaccactccctaatctcaagtacccagggacacaaacactgcggaaggccgcagggtcctctgcctaggaaaaccagagacccttgttcacttgtttatctgctgaccctccctccactattgtcctatgaccctgccaaatccccctctgcgagaaacacccaagaatgatcaataaaaaaaaaaaaaaaaattagctgggcgtggcagcggacacctgtagttccagctactcgggaggctgaggcaggagaatggcatgaacccgagaggcggagcttgcagtgagccgagatcgtgccactgcactccagcctgggcaacagagtgagactccatctcaaaaaaaaaaaaaaaaaaaaatttacaaactgccctgtccaaagcacccagtgcaggaaggaggagatggccggaggtccactgctgactcatcaggagagccaagacggcactggcttctgcccagggctgagtgagcagaaccacagaggggacgaggcttagaaaatgggacaaggcctgacccagggcaggtggggaaatggaggccaggtcccctgccgggagagtgacgctgaaggttgggagggcaactccatattggtccccaagttgggagccgtgcagcagtgagcagcggccactatgggccaggagcaagtcagtgagggctgcaagagcacacggcaggattggggaagaggatgaagaggaggacggcttccgaggaagggccaggcggccccacgagcagacaccgtcagggcgcactgccacccaacgggcatacgagacgcaccgggacaggccagctgggccacacggatgctggagtttagagacacatgaagtcactgtggaagtgacacaggcagtgacactttgcggagagcattctgggtgggagaggtagctggcagcctgctgcaggcatcttggtgacacgcaggtactgagggcttgtcccccgtgacttcccaggacctgaggacagaacccgccttacagaccccctcagctcctgggggaaggagctatctgcttctgcaggacaaggcccggtctgagcaggtacttccaccagcccaagggcagctgaggcactcgctgggagacagaagaaccccgaaaacatctacgttctccccccacaggaggcggcggcacaggcctctcacatggcagcagggaactgcagatggggctgagtgaaggtccccgagacaggagagcattctgggtgacccagggggcccaggttcctcaccaggtcctcacgacaggcggtgggaggtgagagactgactggaagaggctgcgctgtggctgtgaaggaggaaggggccccgagccgagggatgcgggcgcctccagatactgggaaaggcaggaaacggattctcctctggagcctctgggagggacgggcccggcccacagcgggatctcagggctcggcattgtgtaaggcactaagttgtggcaccgtcggagcagccatgggagctcacaggccactcaccgaaatcggggcgtgctgggaggggaagccacagccttcgcgcgcaaccagtgcctctcagggccctgggggagagactccggcgaccgtgacattcaaatctgaggcggggtcctgggccagcagccaggaaagaaactcatgccttccctctaagcgctgtcctacggcctgcccagccctgccccggggacttctgcctagaagctgccctggcgtgacaactggttcctgggctgaaaacagagcatgctgcatgggaagtggccaggtgggttctgtcctggctggacatgggcatggctgaaaggatctcagaggtacctgaggccctcaaacctggggcggccaccctgactcatggcatgctcaggacagtggcccccgggcaaggccagtgctgcgggaaggcatggtcacttcctggctgactctcgaaggggcaacagaagccaggggtagccttgcaaagacagccatggggactcctggtcctggcgagaaggcctggcttaggccaggcgtggtggctcatgcctgtaatcccagcactttgggagggcaaggtgggcggatcccttgaggtcaggagtttgagaccaacctggccaacatggcaaaaccccatctctactaaaaatactaaaaattagctgggtgtggtggcacatgcctgtaatcccagctactcaggaagttgaggcagtagaatcgtttcaacctgggaggtggaggttgcagtgaaccaacattgcaccactgtactccagcctggacaacagagcaagactctgtcttaaaaaaaaaaaaaagccaggcatggtggctcgcgcctgtaatcctagcactttggcaggtcaaggcagccggatcatttgaggtcaggagttcgagaccagcctgaacaacatggtgaaaccccatgtctcctaaaaatacaaaaaattaaccaggcgtggtggtgcatgcctatagtcccagatacttgggggactgaagcaggagaattgcttgaacccgcaaagcggaagttgcagtgagccaagattgtgccactgcactccagtctggacaactgagcgagactccatttcaaaaaaaaaaaaaaaaaaaagcagccctggcttagagccaggcgtccctgggctcaaatccgtggcaccacctgccaattcacaggccctggccaccagctcaacagccccgagcctcgatttccttgtagaatggagatggtgatgatgtgtcctgcccagaacagggctgatactcgctggatgcctcccagcccgcacctgccacaccaagaaggtgccacggggctccccgctgggtcccctggcctgcctaagatgggggctgaggaggggtcacctgagggctgggccgccccgggcctggcactcacttgaactccgaggagtggttgtccagcaggcccagcttgctcagctcctcgtccacaacatccatgacgtgcttggggaccacgagctccttcaggcgctcccggaacttctcctcgatggcatccttgtcgtccttctccaggcccagctccttcttgatgatctttagctgctcctgcagcaggtacttacggtgggtctgcttgatcttctcctccacctgtggggtgaggtgctgccatcaggccctggctccgggaagctgggtgggtgggtgcgtccccagacgaagggggaccctctgctcccccaggactcagagagaaaagaaacgaaacccagagcacgaagcctttggttccttccatcttcttttgtttttgagacagggtctacctgtgttacccaggctggagtgcaaaggcaccatcatagctcaccgtagcctccacctcctgggctcaagcgatcctcctgccttagcctcctgagtaactgggaccacaggcacctgccacacctggctctaattttaaaattttttgtagagatggggccaggcgcggtggctcacgcctgtaatcctagcactttgggaggctgaagcgggcggatcacttgaggccaggagttcaagaccagcctggccaacatggtgaaaccctgtctctactaaaatacaaaaattagccggtgtggtattgcacgcctgtaatcccagctactcgggaggctgaggtgggaggatcacttgagccctggaggtggaggctgtagtgagctgagattgcgccattgcactccagcctaggtggccgactgagaccctgtcttaaagtaaaaaattctgaaaaatgctacgaccgtgaggtgaccggccatcaggcaggctgtgatctgccgaaaatcatgacagcgagcctcaatggctgggtcttaagaaacagcatcttcacttttcccaggctgctttccaatttccaacactgtccccaagattacaaaggcaaaggaattcttcccttaatgttggacggtcctgagactgctccaccctgggctcattacactgggaccagctttaagcttccctgttcaacgcggagagttccacagcccaggacgacagagcagatgatggcacgaagccctcaaaacccagacaggccttcttggcttgccctggccgatgccaccggtccctccgtgtgctccagagcctgactgatgtcacgtggcccgaggggaaggcccccaagagtggctgcgcctcagccgcgggctcacctcccgccccaggcgctgctgcagcttgctcagttcaaattccttcttcagcagggagagggccttgtacagccgcttaggaatctgccgagacagggaggacagaaaggatgagcagaagtcggcatctgtgtgtgtagggccgaggttgggggaaaatgcgcaccctgagagatgctgccgggaggacctggccatgctgtacccagcacagaggcatgtgtgccctctgccccaacaaatcccgtgctggaaacgcatcctacggatacttcacaggccctccagctgcgtgcatggggacgcgctcaggagtgctgctcacaacagcaaaagactggcaacgccccgggtacacggcccagaggatcccactgaacccgcaacggtgactcccaaccgaaggctatgaagccaccgaaaggcggatggatgtggaccaagacacgcagcgggaaatcatctcaaaaacagagccagggacacacagctgggtgtggatggtgcacggtggagggacaagggcagccaggcatgggggagctgaggaggaacgggggcagccgggcgtgggcggagcatagtggaggtggggtgcagccaggcgtggggggctgtggaggtgacgagcactcacattggtctcttccaggacgtcctgcagctcatgggactcggccccggtgagcgcggcgcccatgtcgctcaggtagatggggttgtccaccacccgctggccagcctgcatcatctgcagcactgactccctgggggacaaagggagctgcctcggtggccagggcctcacgctctgctgcagtgcagcccccaaacggggacccggtcctcagggtccctgtcccctgtagctatgggcacggtctaggggtgctcgctgggagccagctctgctgcttgttctccagagttcagggcccacccgtcctgggctggaaaggcatgcagcatcctcacgtgcagccaccacgggagccgtgcagtgacctcacctcagcagtctgctccccactcccccagccaatgccaccaacagcttccggcctcagcagaaggggacaaagaaactgggcctgctgagtcggccccgggcctcccacctgccccatgccccagtgggcaacgggctcctccacacaggccactccttggggcaggcaaggtttcctcccaggaggacgctgaggaagccccctacccacccagctgcagaaagagctgcagagatgcccccgcctggccagctgcccgcacagaggcccacctgtagagagggttcaaggcaatgatgtcccggatggtcttcacgatctctgcagtcagggcctgccaagtatggggcagggtcgctggggcccagcagtgctccagcagggggtgggctgggtgggagcatggccctgggagccccacccaccagctccatcaactccctcccctccgccaactggccctggccacggacggcctgggagatggaggagtgcagtccctggtggactcaccagtcccagggacacaggaccaagagagtcaaaactaaaaccaaaccctgtctccttacccctcagagccttgtccttaggataagctatctcaggggaaaaaaagagactgtgttttctttcctccattt[131 bp omitted]ctaccaaaaaatacaaaaattaggcgggcgtgatggcgggcgcctgtagtcccagctactcgggaggctgaggcaggagaatggcgtgaacccaggagat[140 bp omitted]actcactgcagccttgaattcttgggctcaagcgatcctccccgctcattttccggagtagctgggaccacgggcataagcaactgcacctgcctacaaccaaattttaatcacctggtcttggccgggcgcggtggctcacacctgtaacaccaacactttgggaggcagagttaggtgggtcacttgaggccaggagctcaagaccagcctggccaacacggtgaaaccccatctccactaaaaataccaaaaaaaaaaaaaaaattagccaggtactttggtgggtgactgtaatcccagctactaaggaggccgaggcaggagaatcacttgaacccaggaggcggaggttgccatgagccaagattgcgccagtgcactccagtctgagtgacagggtgagactctgtctccaaagaaaccgtaatcacctggtctctagtctttggctttgacgctgaactgtctgagctgaccctggtagaaggcaccagaacaggcccactggaggtccggggcacttgctttaagaataagttcagctgggcacagtggctcacgcctgtaaccccagcactttgggatgctaaggcgggcggatcacgaggtcaggagatccagaccatcctggctaacacggtgaaaccccgtctctactaaaaaatacacaaaaaattagccgggtgtggtggcgggcacctgtagtcccagctactggggaggctgaggcaggagaatggtgtgaacccgggaggtggagcttgcggtgagccgagatcacgccactgcactccagcctgggcgacagaggctccatctcaaaaaaaaaaaaaaaaaaaaaaaaaaagaacaagttcgctgcccctaaggggtcttgccagttctaatcacatttgtaagtttggtcgctgtcttccccctgttgcaagattctcacagggaatgccccaatgctgagctgcccaggacagtgtagccgctggtggctgtctgaattttttttttttttttttgagacagagttttgctcttgttgcccaggctggaatgcaatagtgcaatctcggctcaccgcaacctctgcctcccaggttcaagcaattctcccgcctcagtaatcccgagtagctgggattacaggcataagccaccacacctggctaatttttttttgtatttttagtagacacggggtttct[139 bp omitted]cactctgttgcccaggctggagtgcagtgatgcgatcacagctcactgcagcctcaatctcctgggctcaagcgatcctcccacaggttagaccactggtgtgtgcgaccatgcccagggattttattttttttgtggagacaggggtctcaatattgcccaggctggttttgaactccagggctcaagtgatcctccttccttggcctccaaaagtgttgggatgacaggcatgagacactgtacccagccaataaaatgttccattctgttccttggccacagcagctctacttcaagtgctcaatactcacaggtggccgggcacagtggctcacgactataatcccagcattttgggaggctgaggtgggcggatcacccgaggtcaggagtttgagactagcccggccaacatggtaaaacctcgtctctactaaaaatacaaaaattagccgtgtgtggtggcacgtgcctgcaatcccagttacttgggaggctgaggcatgagaatcacttgaacctgggaggtggaaattgcagtgagctgagatcgttccattgcactccagcctgggttgacagagccagactctgtctcaaaaaaagaaagaaaaaaaaaaacctcgcaggggtagtggggcaggatagaagtgctgacctcaagaacccaggtgggcctgtggacaggactttccacccctgccagcgcccacagcagacatcaccagttgctcacagcacttccccctaggccctgcagcagcctggggaagaggctgatgacaccaggcacacaggtaaggagctgacacgcttcaggcctttggttagcttcgctgactgtccctacagcgggagggcaggtggcaccgccaagagcctgcccacctcggaagctgactccttgtgccaccaggcaggcaggacggcctaggttgggggatcagggtggccaacaggctgtttcctgtcctgcaaccactggtaccaacctcccaggcttggtgggaagaagccagggctggaaggtgtcttggtaaccgctggaggctttggcacaggggacacgggctggggctggacctgggttccaaccctgtctccttcctgagcagctacaggctccagcgaatttcctgtgcctctcccatcccagagtcttccgaagacctctgggaggaaaagcaccctctatgttccattagaattgagttccagacaggccagacccttcctaaggggctcagggtgggagatgactcttcggagaggccgcaggaacggctcaagggagcccgtgggggaggcagctgtggccgccctgcgtgacgcacggactcactttcacctcctccgtgacctggaagtcctcgtggacaacgttctctacctccaccatgagcacctcagccgggagctcaggggtgggctccatcgccagctccgccgggtgcctggcgctcagctcgtcctccgcctccttcttgccccgctttgacttcctgcggggcttgtgcttgttctccgcctccggctcctcgggctccacctccagctgtctgctgatatggactctgacacgggagcaaggcaggtgtgaatcagccgctgaggctgggagctggacccggctgaggcctccctggtggcacaggtggtccaagggtcccgctgagcccagacctctggagccacagggtggctacagggtcctcaagctggagacgtgagccgctttctcggggcctcccaaccagtgtcccctccaccccttagactccagccagattcaggcattccctgcatcccacgccaatgcatcactgtccccatcctaagtatcgtggataagctgcagtgacaagccccagggcctcctgtcgaaaacggtgtcagcctggccgggcacaggctggtctccaagactctgtgccctggactcagctcatagcagctccttcctgttgttcaggtctcgatttcaaggacaccatcgcaaagactgtccccaagcacttcacaaaagctacccacctccacctctcacgctgtctgcgtctcccctcagagcacctggcaccacctgaactcagggtctcgctctgttgcccaggctggagtgcagtggtgtgatcatagctcactgcagcctttacctcctgggctcaagcaatcctcctgcctcagcctcccaagtagctgggactacaggaacacgccgtcacatctaactttttattattttttatagaaacagggtcttgctgtgttgcccaggctggtctcaaactcctgggcttaagcgatcctcccacctcagcctcttgcgtagctgtgaccacaggcatgagccaccacatccagctaatttttctacattttttgcagagatgggatctcgctacgttgcccaggctggactcaaactccgggctcaagcgatccaattgccttgacatcccaaagtgctggaattccaggcaggagtcaccatgcctggccctgcagctcacccctttctgagacaggaggggtccagaggtgacatgtctcactctcacccccagctctggcctcagtgctagtgagaaagccgctgggctgacggacagggcagaggctgatgctggggcataaggcatcctggctggtctcccgcgtggtactctgcccccacctcccactgtcccccgccagccacccaccttctgtgtcccatgacgatcatgcgcagcttgtccccaaggtcctgcatctcatggatctgggcaaacgtccccgtgtggtagatttcatccaggctctcgaccacatccgactcattgctgtgggagaagagcacagaggaatgttggaacatggctttcatgctaggcaggatgtctctggctgagatggaggagggagagaaaagaaacgcccctaccaaatgctactgaaaaccaagagcggcctccttggctcccgcaggagctccagagcctaggggagcttctgccaggccagggctgccccagtggtcacaggaccgggtgggtggctcctcgctaagtcagccacaaagacatggtccaggtgggactttgatgagtctcttctatgctatcacagagcctgcttcgaatgcatgcatggaactctttttttcttgagatggagtttcgctcttgttgcccaggctggagagcaatggtgtaatctcagctcactgcaacctccacttactaggttcaaccgattctccttcctcagcctcctgagtagctgggattacaggtacctgccaccacgcctggctaatgttttgtatttttagtaaagacgaggtttcatcatgtcagccagactgctttggaactcctgacctcaggtgatccacatgcctcagcctcccaaagtgctgggattacaggtgtgcgaccccacgcccggcccatggaactcatttctacatggagccacatctccgagcagctagctcgactttcaggtagcctcatggagcatttcatcactaagagtccctgaagttaatttcccccgtatcttaacaatgcatgaagtttagtactacaagctgagttctcagcccaggctgaaaaggtagcctgcgtggcttctggcctttattctggaggtcttccctggtttcctcggggtcaggggtcaaaggtgcaaagtacagagtaggacttgtggtgagctggactctagggcaccgtcaacaagggaatgaaggaaaaatcacacttacctgtcatctctctttagaaagacgccgacataaggctgggcgagacgaactttccttctcagcagctcaaccaacttcttatttttaacctagcatgacaatgaccccaaagtgaaatgcagagtagattttttttttgagacagagtctcattctgttgccctggctggaatgtaatggcgtgatctcagctcactgcaacctccacccccactgagttcaagggattctcctgcctcagcctcctgagtagctgggattacaggcatgcaccaccacacctggctaatttttttatttttagtagagatggggtttcaccatattggccaggttggtctcgaactcctgacctcaggtgatccacccacctcagcctcccaaaatgccgggattataggcgtgagccaccaaacgcagcacagggtagcttttcttttttttttttttttctgagacggagtctcgctctgtcacccaggctggagtgcagtggcatgatctcagctcactgcaacctccgcctcccgggatcaagcaattctctgcctcagcctcctgagtagctgggattacaggcgcccgccaccaggtccggctgattgttttgtatttttagtagagatggggtttcaccatcttggccaggatggtctttaactcctgacctcgtgatccacccacctcagcctcccaaagtgctgggattataggcgtaaactaccacgcccggcctcccagggtagcttttgtagctgacattttttgacagcagagccgctctaacgctgtgtagattattctctggggacatgctgatccgcatcctggatactaatcaacatggtttgggaacgcctaaacaaaaaaaaaaaaaaaaaaaaaaaagtgctggaggccaggaggctgtggtggtgaatacagtgagcagaactgaccagctggattcttcttagcggtttccccactcccaaaggaaattcaaagtagacgaatggtcagaacccagaaattgatttaacatccagcttcaaaggggatgtccagggcaaactgtcttggtttgaaaatcaaaaccattctgcttttattaatgtcagaataaacataagtaatttaaatgtgacccactccaga[223 bp omitted]gaggcaggagaatggcgtgaacccgggaggcggagcatgcagtgagccaagatcacgccactgcactccagcctgggcgacagagtgagactctgtctcataaaaaaaaaaaaaaaaaaaaaaaaaaaaaaaaaaaagaaagtttcactctgccacccaggctggagtgcactggtgcaatctcggctcactgcaacctccacctcccaggttcaagcgattcttccaactcatcctaccacatagctggggttacaagcacacgccactgcactcgctaatttttgtattattagtagagacggagtttcgccatgagccaccatgcctggttcctccaattttcattgacagttacttccttatcacatcatatgctgttcattaatgatcaagacccccaggatcacagcacattctcaacggcaggttcagggctaatgatgtcttctaagaagcatttgaaggcgcaaggagctcacctgatttctttcaagcctttgttaattcactggacagaccctgattaaaggtaatggcctggctagcctggtaatggtagctcatgcctgtaatcccagcactttgcggggctgaggtgggaggatcgcttgagcccaggagtttgagaccagcctgggtaacacagtgagaccccatctctattttctttttgaagtttttaattctttattatataataaagttaaaatatacatatatatatatatatatatatatatatatatatatatatagtaatggccctcaaacttttgcaggcaccaggatgacctgaaggactttaagcagctcactgctgggccccacccttggagtttttgattcagttctagggtgggtccaaaaatctgcatttcaaacaaaagagcatcacatgatgccgatgctgctggtccacaaccatcctttgagagccagtgttttgactcactccctaacacaggctcttaacttgtggtccagaaattcctgacactatagatacataattttttttttttctgttcccagaaaaaaaaaagtcagtaacatctgacaggagggtgtgtgacccactgttataagtaaaatgtttgtttagagacagaacgcttgtacctctgtactgtaaggaaaaattagcatttggacaaaaagttttcttagcaagacaattttactttctgaagaaagggtgctcctcgcagatggaacaatggcgagagcagagcacacctgaacaaaggagggaagcaatttttttttaagacagagtcttgctctgtcgcccaggctagagcgcagtggagcgatctcagctcactgcaagctccgcctcctgggttcacaccattctcctgcctc[135 bp omitted]agcctcccaaagtgctgggattgcaggcgtgagccaccgcgcccagcccacgaagttagtttttaaaagaaactaatacttctaacacttatgatttattctttaatacccaccaaaaattaagagccattgttccttactcaaaagttgctaataggagagaagcttctagagcaagttggccagacaagtcaagtacaaactgaagagtaaatcaagctttgctaacaatttcagaaacatttattgggtcccaaagaagttgcctcccaatttcccctctgccaacagctgatagctgcatccttggcatctgcctcctggccttggcaggatccatttttatgatttacaatgcatcatcaaccagaaatacaatgagaaccacctgccagtctcccaaatactatctgcagccactcatttaactctcctggctagctccacgtgggccgtctgaactctcttagaagaatcatctctctgctcaggcaccgggagcaaggggcatctgtcgctctgcagaacggaggggaccaggcctgatgaacaccatcctgggcccagaaacctgggagggtaaagagaactgccaggggtgaagtcaaggatgggaaaaaggcctccggggcagagtcctgaaatgtcagaagtacaccaaagaggaaacagcatcacgttattgctgaggcagggcctcattctgttgcccaggctgcagtgcagtggtgacaccatggctcactgcagccttgatctcccagtttcaagtgatcctcctgcctcagccttccaagtagctgggaagacaggtgcatgccactgtgcccggcttttctttctttctttttttttttttttttgtagagacagggtctatgttgaccatactggtttcaaattatgctcctgcctcagcctcccaaagtgctgggattaaacatgtgagacaccgtgcccagcccacatggcctcatttaaatcccacaacaactctaataagacactaatatgtccaggtcacagatgagaagagggaagccaaaggaataacttgctgaaggttatggagctaggataggaccccacaaggtcttgctctgggggcctgcatcagtaaccagtactcaacatcaaggaaaggccttggggccgggcgcagtgactcgcacctgcaatcccagcactttgggaggctgaggcgggtgaatcacttgaggtcaggagttcgagacgagcgtgggcaacatggtgaaaccctgtctcttctaaaaatagaaaaattagccagccacggtggcgggcgcctgtaatcccagctactcagggggctgaggcaggagaatcacttgaacccgggaggcagaggttgcagtgagctgaaatcgcgccactgcactttagcctagatgacagagtgcaacttggtctcaaaaaaaaaaaaaaaaaaatcttggagcagcgttggagaagctccctctgtcccctctctactggctgctgcccctctgaaatggcctttcccttcccaacagatccttgagatttgtttagaagagtctggagagtgagcgcagaggctgactcactgcgtgaccttgctctgccagttaggagataaccttcccatagatgccactttccacatcagtagtttttttttttaagggaaggggagctgggggagaaggcttttggggccttcctactgtaaaagctcaagttccttacactcactgctttctctctattacatcatcctgctccctccccacccccaaggctcttagtctgaaatgatctaatttctaccaccggaatgacttgttctctacagtattctcagaacttgctacgtggtaggaggtcaagaacacactgaataacccacctcttcccaccctcctaagcctcctgtcccatccatgctctactatttctcgtaattattgccttctaatacaatatcgttactaaacatctttattgcctgtctcatcctgccaaaatgtaagctccaaggcagatttattttttaagagacagggtctcgccatgttgaccaggctggactccaggtttccaacaatccttccacctcagccgccagagtagctgggagtacagcgcgcgccaccatgcccagcttcaaaggcagaaatttttgtctgttttgttcactgccatatccccagaacctagaacactctctggcaaataataagcaatcaagaagtatttgtctaagaaaggaatgaattctgatcccagtgaggctcgtaaccagacggcagagcgcctggggcgaggaggtattacaaaactcgtgccaagtaaggagaaaactaacagcgccgtaacactactcaggtccctcccggccccggatttctatgaccggcgttctaaagtggataatcctaggctcatcgggttcaactcctctcatctaacggatcctaagaaatccgaaagggagaggactttggctcaaggttcccaagctagtggtgagcagacaaggattcgaactgcacccttcgagaaacttcatgtctgaaaaagttgcgaaacacaagggcgctcaagtgatcccacggttcagcccgctgcttgcacaggtgggaaacctgaggccgaggcggggactcccattacctcgataatcttgataaagcgcgggaacaccgggttgcgggtgatggcgatgagcggcaggtgcggaaacacatcggggatcgtcatgggcgtgagcgccgttatgaccgggccttccccggcgcccgcgctgccccccgcgccgccggctccttcctccgcgccgccctcggaggcgtcctcgccccccgagaatgcgcctccgccgcggctgctcgcttcccaaaacccccgccattggcccccaattgccgggcctcggccccacagtgcccaaggaggagaggcgtcgcaggtccgctggcctcggagcaaccacgctcctgctgcagtgggaacccgccccccggcggcggccagcatcggccgccgcagcacccagcaccgcgccgctccccacagtcgcacgtagccagtgctcgccgccatagcccggccatactggcggctcacacaactcgcgtcatttccgctcgccgcgaaacgcacgtgacgcccggcgcgtgcctcggtacccgatgggcgcgtggctcgaaacagccgcttcagggagctgggcctacgcggagaagagggggcggagttcgagcatcggatcgtctccgcctcttccggtctcccactttatgcgctgaaggccttttccggtcacgtggaaggctgtgagcaggcgccagcgcccgtacaaaacactggtagtgttgcaaacgcaacgtttaggaactcatgagcagcctgtgcacatgcttaggcgcgcggacaacatgcgcatgctcagactctagactggccacgggtggccgggtgcgcatactcaggctctgagcgcactttggggtgcgcggattcgggcttcccgggattcgtctgcgcatgctcaagattcaggcggagcgccgggctgcagtgcgcggaggcccgctcccgggactcattgatgcgcatgcgcagggcttcagcctgcacgtactcggattgtgcagcgactccccgtggcggttgaggggcagtggtggcggcggaagcccaagtcgatgctgatgttgatgctggtggcggctgtgaccatgtggctccgaccgctggtcacagctcagctctgtcggtggggctgccaggactcctggggctggggtgctgccgggggtcgggagggtgctggttcatcttggagccgaggcctgctccccaacctcactgaggctccccttttactctttttaggaatcgaacttgacgcctcgctcaccctactccaccccatcctcccagcccgatattaagctctcctacctctttttttttttttttttgagacggagtctcgctctgtcgcccaggctgcagtgcagtggcgcgatctcggctcactgcaagctccgcctcccggattcacgccattctcctgcctcagcctcctgagtagctgggactacaggcgcctgccaccacgcccggctaatttttttttgtatttttagtaaagacgggggtt[143 bp omitted]tgctctgtttcccagggtggagtgcagtggcgcgatctctgctcactgcaacccccgcctcccaaagtgctgggattgcaggcgtgagccaccgcgcccagccttacccagcacattttgaaatttcagtaaatgttaggttagtgcatactccaacctgccatggggaccagttgctgaaactccgttcctgccctcagggaactcccatctggactaaactgtcacattcagtagggacctgtgagctgtattcttagggtgtatggcctcatttgatgtttacaggaagattcataatgattccttaaccttattttattttatttattattattttttgtacagatggggtctcactggctgggtgcagtggctcacgcctgtaatcccaacactttgagaggtagaggtgggcagatcactcacttgaggtcaagagttccagaccagcctggccaacatgatgaaacctcgtctctactaaaaatacaaaaattagccaggcttggtggcaggtgcctgtaatcccagctacttgggaggctgaggcagaaaaatcgcttgaattcaggaggtggaggttgcagtgagctgagatcgcactccagcctgggtgacaaagggagactctgtctcaaaggaaaaaaaaaaaaaaagagatggggtctcactgttttgcccaggctggtcttgaactcctaggctccagtgatcctcctgcctcagcctcccaaagtgttgggattacaggcatgagccacccatgcccagccatacccttattttatttttttgagatggagtcttgttctcgtcgcccaggctggagtacaatgtcacggtctcggctcactgcaacctccgcctcccaagttcaagcaattctcctgcctcagcctccagagtagttgggattatgggcgcctgccaccacgtgcagctaattttttgtgtttttagtagagacagggttccaccatgttgcccaggttggtctcgaactcctgacctcgtgattcacttgcctcggcctcccaacgtgctgggcttacaggcgtgtgccaccgcgcccggccaacacccttattttatagatacgaaagcatacttaggaaagttaaagacacacttgcctaacaacacatacctagtaagtgggagaaacattttccagtgaaatttactaataggatttgtctcgagttctgaaaatgtgggttatatccagttctctcatttccccacacaggctctcaaagaatggtccctggaccagcagcatcaagatcacctggaatttattataattggttagaaatgcagttccctggacctactgagtcggggacttggcagtgggacccagcaaacggtggtttatcaagacccccccccccgcaaccccggtgattctgatgcatattcaagattgagcacctctgctgtaaactataccatccttccagtcaccacacactcccttaaggagccccgaataccttgttgcaggacttcataattttcc[182 bp omitted]tggcgggcgcttgtagtcccagctactcgggaggc[132 bp omitted]agaaattttcagaaatcatttctacattttgtgtgtacttatgtctgtttctgggagaggagtttcatacaaattttattttttgacggaggcttgctctgtcgcccaggctggagtgcagtgtggcaagagctcaactcactgcaacctctgcctccaaggttcaagcgattctagtgcctcagccctcagcctcctgagtatctgggataacaggcgcccgccaccctgcccagctaattttttttttttttttttttttttgagacggagtctcgctctgttgcccaggctggagtgcaatggcgccatctcggctcactgcaagctctgccttctgggttcacaccattctcctgcctcagcctcccgagtagctgggactacaggtgccgcaaccacgcccggctaatttttttgtgtttttagtagagacggggtttcaccgtgttagccaggatggtctcgatctcctgacttcgtgatccacccgcctcggcctcctaaagtgctgggattaacaggcgtgagccaccacacctagcctgttttgttttgtttttgtttttttttttgagatggagtttcactcttgttgcccgggctggagtgcaatggtgcaatctcagctcaccataacctccgcctcccgggttcaagcgattctcctgcctcagcctcctgagtagctgggattacaggcatgcgccaccacacgctaattttgtatattacaggctaattttgtatatttagtagagacagggtttctccgtgttgctcaggctggtctcgaagtcccaacctcaggtgatccacccgctttggcctcccaaagtgctgggattacaggtgtgagccaccgtgcctaacttttttgtatttttagtagagacgagatttcacgatgttggccaggctgatctcgaactcctgacctcagctgatccacccaccttgacctcccaaagcgctgggattacaggtgtgagccaccgcacctggctctaattttcgtattttcagtagagatggggtttcaccaagttggccaggttggtcttgaactgctgacctcaagtgatccacctgcctcggcctcccaaagtgctgggattaaagacataagccaccacgcccagcctcatccaattttctagggcctcctataacccgaaaagcatcaggaacagatacttggctgggcgcagtggctcacgcctgtaatcccaacacttcgggaggccaaggcaggcagatcacgaggtcaggagttcaggaccagcctggccaatgtggtgaaaccctatctctactaaaaatataaaaaattagctaggtgttgtggcgcgcgcctgtaatcccagctactctggcggctgaggcaggagaaacacttgaatctgggaggcggaggttgcagtgagccaagatcttgccactgcactccagcctgggcgacagagtgagactccgtcccccccaaaaaagaacagatactttagggttaaccctgagttggctgagtaggaggattcatgctgaatattcaataaaaattgacagatggtctttcttgtcacttctagttctcgcacagtgaggacaggaaaagtgtttaatctgatacaggacgttcaaggggtatgtggctccatgcttaaattcatccttcacttttgtctaagtacaggatcagaggtaacacttcctggtatttcttgggtgcccgtgttgtcaagcatttaagatcattactttattcagtctttacagttctttcccctttgaaatagggattaatctttcccatttcactgagaaacaagtttagagagatcaagtcatctgaacaacgccaagaggaagaagtgggaatagaactaagatggtctgagtttttatcgagtgttctgtttacttctctctcagataggagattttattttttgagacagggtcttgcactgttgcccaggttggagtgcagtggcgcaatctcggctcaccgcaacctctgcctccccagctcaagcgattctcatgcctcaccctccctagtagctgggattataggtgtgtgccaccatgcgcagctaatttttgtatttttgtagagatgaggttttgccatgttgcccaggctggtctcgagctcctggacttaagtaacctacctgcctcagcctcccaaagtgctgggattacagacgttcaccaccgtgcccagccttgatgggagattttaaaatgcatagtaacagtagaagcaaaccctgttactttgtttacctcatgtaatgtcacaggaaatgtcagtttacttcatgcttaaaatgcatgaagaaaaaatattctgtcagttcaaatt[136 bp omitted]ccccgtctctactagaaatacagaaattagccaggtacggtggcgcatgcctgtaatcccagctatcgggaggctgagtcaggagaactgcttgaacccaggaggcagaggttacagtgaaccaagatcgtgccactgcactccagcctggggcgacagagccaaaaaagatgcataatttcaaaatggtgtcagcattttgaaacaatcttcaagtgactggtttctaacatgttaatattcatcattctctggactttcaaataactaatcatctgtaaacaaatagtaacatgaataggtatgagatgtgatatgaataattaccctgttaattttttttttttttttcctgagatggagtcttgctctgtcacccaggctggagtgccgtggcacaatcttggctcactgcaacctccttctcctgggtttaagccattctcctgcctc[214 bp omitted]tcttttagggacagtgtatctctttattgcccaggatgtagtgcagtgctgagatcatagctcactgcagtctaaaactcctgggctcaagccatccttctgcctcaggctccccagtagttgggactacaggcatgcactaccatgcccagccaatttttatgttttttgtagagatgtggtcttgctatgctgcttaggctggtctcgaactcctggcctcaagaaatcctcctgcctcagcctcccaaagtgttgggattacagacgtgagccaccgcacctggcccaccctgtgaattaaaaaaactgtttatttggacataattatagatttacagcaagttgcaaaaacagtacagggaggtcccaagcccttctgccagcttcccccagcagtcacatctgacatgatcatagtacgaggtcaaaacaggaaaatgacattggtacattccacctacctaattcagatttca[138 bp omitted]ggtgaaaccctgtctctacaaaaaaaatagaaaaaaccagccgggcatggtggcgggcgcctgtagtcccagctactcgggaggctgaggcaggagaatggtgtgaacctgggaggcggagcttgcagtgagccaagattgtgcaactgcactccagcctgggcaacagagcgagactcttgtctcaaaaaaaaaaattatttctatcagctgtttatggttattgatattattaagattttgtgattatctctctaggaccgcctgtattttcatcctacaacaacacgcttgattaaacatccttgcgagaaaaatatagcactatatctagggtaagtggcaattttatgtactgttaccttccttttaaattaaatctttagatttgccccattcattcgttcaacaaacagtaaagaagatggctctgccgtgtgttgctagttgctggcctgtagggagtccatagtcaggggctggaattggaggaagggaaatgaagagatcagccagtaactaaaacaactgcagtatagtgtggtaccacctgtcaaagatgcttggtataagcactgttgggatgcctcaggaaaaaatgcctaggaagtttccactggggagttgatgacaaaactgggttttgaaggatgaataggagttcactgggatggtgggagcaaccagatgtgtatgggcttagagcagagcattcaaaggaataaaaacaccatgcttagcatgcacgtgagttcgtaagggtagcaggttaggaaaccaggtatgtccaccatgccaggatgcttaccctcaccctgagggtagtggaggatgtggggctgcatgactcctgtttgtattcaagacatcagtctggcagcatcaaaaaggggactggaggccaggtgcagtgactcatgcctatagtaccagcactttgggaggccaaggcaggaggatcgctggaggatcgctggaagctaggaattcaagaccagcctgggaatatagcaagatcccagtatctacaaaaaaaaaaaaaaaaatacagaaaattagctgggggtgggccaggcgcagtggctaacctctgtaatcccagcactttgggaggc[134 bp omitted]gaggcaggagaatcacttgaaccc[142 bp omitted]tgcacctgtagtcccagctacttgggaggctgaggtaggaggtttacttgagcacaggagttcgagggggtacagtgagccatgagcacaccattgtaccccgtctggatgtctggatgacagagaccgtctctgtcatcaacagctcttttataaatcagccatgaccaattataaaacataattatggctgggaggctgaggcaggaggatcacttgagcccaggagttgaaaaccagcctggataacatagcaagacccatctctctctctctctctctttttttttttgagacagagtcttgttctgtcacccaggctgcaatgcagtggcgcaatctcggctcactgcaacctccgcctcctgggttccagcaattcttctgcctcagcctcctaagtagctgggactacaggtgtgcaccaccacgcctgactaatttttgtatttttagtaaagacagagtttttaccatgctggccaggctggtctcgaactcctgacctcaggtgatccacccacctgggtctcccaaagtgctgggattacaggcatgagccaccacacctggccatccatctctctctctctctcttttttaaaggctattatgagaaatgccattcatgatggcaacaaaaactttaaaaggaataggaattaactcagtaaatctttttttttttgagacaatgtttcactcttgtcgcccaggctggcgtgcagtggcatgatcttggctcactgcaacctctgcctcccaggttcaggcgattctcctgcctcagcctcccaagtagctgggattacaggtgtgcaccaccatgccaggctaatttttatgtgtgtttttagtagagatggggtttcaacatgttggccaggctggtctcgaactcttgacctcaggtgatctgcctgccttggcttccaaagtgctgggattacaggcatgagccatcacacctggccaactcagtaattcttttctgttgaaaaccataaaatttactggggagttggggaaggagatctggataatgaaatgatataccatgttcatggatggccttttcctatttaaaagtttcccatatgaaggaacaaattgtttatttcttatatacacattcctggtctaaaactatttacgttagtggaactagagccatataaattataaaactgaagtccatcctgccactcaatgtacattttatatagttttatatttgatgtattcacacatttaaactattatttctggaagtcaaacacctggactgtagaggtttatttatgcaaaataagtaaattatatctaaatgactcctggttacaatacaaattttgtttgaatggagacattttagagtacctctattgtcttttttctttccttgtgtgacattatcctaatttaacttatttattgtttatttcaggaaacaagtttttttcacaatggataactttgagactagtctccttccatttaccatccctacatcaatgcaggtagttattttactgagtgatctgaaggatgctagtataagtaatatttgggggaaaatacagttcagaaatatcagactggtctgtttttattagtttagaggtttattttacaatgtacctcttcaagacattaagggcaatttctaagcctaaagaagggctggttttattctgcccctactaccaaaatagactttctattcctgaaaaagaaaaaaagagtggatgtaggtcctcttccttacattggttatattataaatagatagatgggatggtatcttactttatatgcagtaatttcaagacctcccttggtcaggtaagtggctcacacctgtaatcccagcactttgggaggc[134 bp omitted]gaggcaggagaatcactcgaacccaggaggtggaggttgtagtggcctgagatcgaggcactgcactccagcctgggcaacagagggagactctgtcttaaaaaataataataaaataaaataaataaataaataatagataggtgggatggtatcttactttacatgcagtaatttcaagactccctcagtcaggtacagtggctgatgcctgtaatccctgcacattgattggccaagacagga[144 bp omitted]actaaaaatacaaaaaaattagctgggcgtggtggcaggtgcttgtagtcgcagctacttgggaggctgaggcaggagaatggcttgaacttgggaggcggagcttgcagtgagccgagatcgcgccactgcactccaaccccagctattcgggaggctgaggcaggagaatggcatgaacccaggaggcggagcttgtagtgagccgtgatcgcaccactgcactccagcctgggtgacagagcgagactccgtctcaaaaaaaaaaaaaaaaagagccccccaaattgtcctaaaccaaagcacacccttagtgaatatttgagaaattataccatcgacacctatgctaaataaagttttgggctggacatggtggttcacgcctgtaaccccagcactttaagaggctgaggtgggcagattgcttgaccctaggagttcaggactacccagggcaacacaacgaaactccaactctatatgaaattagccgagtgtggtggtgtggtggtgtggtggtgcgtgcctgttgttccagcaactcaggagcctgaggtgggaagattgcttgagccgggagctagaggttgcagtgagctatgattgtgccaccgcactccagcttgagtggcagcttgagactatctcaaaataaataaataaaaataaagttttgtcaattatcgaaaataccaatatttctcctaaaagcgacacttaacagttttttttttttttttttttttttttgagacggagtctcgctctgtcacccaggccggactgcggactgcagtggcgcaatctcggctcactgcaagctccgcttcccgggttcacgccattctcctgcctc[168 bp omitted]caccgcgcccggcctacttaacagttaatgctagtcattcatcatttatactttaggctttgtcatccaagaaggttttgttttgttttgttttgtttgtttatttgattttgtggtttttgttttttgagatggagtctccctctgtcacccaggctggagggcagtggcacgatctcagctcattgcaacctccacctcctgggttcaagcgattctcctgcctcagcctcctgagtagctggaattacccccaaaattagccaccacgcctggctaatttttgtattttttagtagagacagtgtttcactatgttggccagactggtctcaaactcctgacctcaggtgatccgtcttgttctcccagagtgctaggattacaggcatgagccaccacgcccagcttcagggaaggtttttataaaggaagaggagatggaatgaattgaggtatctcagggcacccaagaccagcttcaacttggttctagctggccccaagatacacagttctcagtatctaagaaccaaccaactattgctggcatacatggtgttttttgtttgtttgtttttgttttttttgagacggagtctcactctgtcgcctaggctggagtgcagtggcgtgatctcagctcactgcaacctccacctcccgagttcacaccattctcctccctc[135 bp omitted]gtttttggtttttgagaccgagtctctgtcacccaggctggagtgcagtggtgcaatctcggctcactgcaacctctgcctcctgggttcaagcgattctcgtgcctcagactcctgagtaactgggattacaggcaggcaccaccatgcctagctaatttttttgtatttttagtagagatggggttttgttatgttggccagctggtattgaactcttaaccttgagtgatccgcctgccttggcttcctgaagtgttggtattacaggcgtgagccaccatgctcggccataaatgttttttttcttttctttctttttcttttttttttcaagacggagtttcacccttgttgcccaagctgtagtgcaatctcggctcaccgcaacctccacctcctgggttcaagcaattctcctgtctcagcctcccgagtagctgggactataggcacctgccaccatactcagctaatttttgtatttttaatagaggcagggtttcaccatgttggccaggctggtcttgaaatcctcacctcaggtgattcacctgccttggcctcccaaaatgctgggattataggtgtaagccactgcgcctggtctctttctttttctttttctttctttctttctttctttctttcctttctttctttcttccttccttccctccttccttccttccctccctctctgcctccttccttcctttcttctccttccttccttccttccttcctcctttctttctttctttctctctctctctatttcttttctttctttctttcccagagttttgctcttgtcaccaggctggagtgacccagtctcagctcactgcaacctccacctcctaggatcaagcgattctcctgcctcagcctctcaagtagctcggattacaggcacctgctgccacaactggctaattttcgtatttttagtagagacggggtttcactatgttggccaggctggtctcaaactcctgacctcggtgatctacccgccttggcctcccaaagtgctgggattacaagcgagggccaccgcgcccgtccatacattttttttttttcaatgcatgtctagaagtctgcgtttctgaatcaatgtttgaaaagatgctctcattgatatcatccatatgataacttttaggtcggcgtaccagaagtgacatcagcacattttgctggttcgttattgctgttagtagtggatcaaaaagtctatatttatgattatgaaaataattcttggagcatgtctttaggtatgtacattttgtatttttaaattttgtttgagtgtagtcaacatgagagaagagggtattagtgttggaagtataagcgatgctcctacttggatgtcaaccccaggacattactttgtcctttccaaccaaaatgaaaattggcctgagtccccatccgtagactgggaacctagtgttcccatcatggattgtagtcacaagccacaaaagctacttgggcttattgaaacaaacaagaggcattggccgggtgcgctggctcacgcctgtgatcccagcaatttgggagtctgcggtaggcagatcatctgaggtcaggagttcgagaccagcctgaccaa[134 bp omitted]aacatggggaaaccccgtccctactaaaaatacaaaattagctgggcgtggtggtgcatgcctgtaatcccagctactcgggaggctgaggcaggagaatcgcttgaacctgggaggtggaggttgcggtgagccgagattgtgccactgcattccagcctgggcaacaagagcaaaactctgtctcaaaaaaaaaaaaattagctgggtgtggtggtgtgtgcctgtaatcccagcttactctggagcccgaggcaggaggatcccttgagcccaggaagtggaggttgcagtgagctgagattgggccactgcaccccagcctggatgacagagtgagactctgtctaaaaaaaaaaaaaaatcgagggacatcagcgggtcttggtgatggactggtgtccggggaggaccagggaaaactgaggatgaccagtagatgtctggtaaccaagctggattatgagcattgtccctcccacacacttctcacgagggctaggggacggtagagaaggtgagctttatgaagagggagaaagatgaggactctgatgcaggaggaaagaggatgtgaaaagtgaagatgaggcaaatgttagctttagaaaagaagaggatcgcctgagcccaggagttcaagtccaccctaggcaacagagcagaatgccatctttacaaaaaaccttacttttctttttctggagacagagtctcactcggtcacccaggctggagtacagtggcccagtcttggctcactgcaacctctgcctcctgggttcaagcgattctcctgccttagcttcctgagtagctggggtcacaggcacccgccaccacgcctggctaattttttgtttgttagtttgttttgagatggagtttcgctgttgttgcccaggctggagtgcgatcgcacgatctcagctcattgcaccctctgcctctcgggttcaagcgattctcctgccttaccctcccgagtagctgggattacaggcatgtgccaccacgcccagctaattttttttttttttttgacggagtctcgctctgtcactaggatggagtgcagtggcacaatctcggctcactgcaacctccacctcccaggttcaagtgatcctcctgcctcagcctcccgagtagctaggactacaggcgtgtgccaccacacccagctaatttttgtatgtttttagtatagatggggttc[142 bp omitted]gtcacccaggctggatggcgtgcagtggcgcgatctcggctcactgcaagctccgcctcctgggttcatgccattcttctgcctcagcctcttgagtagctgggactacaggcacctgccaccatgcctagctaattttttgtatttttagtagagatggggtttcacggtgttagccaggatggtcttgatctgacctcatgatccgcccgcttcagcctcccaaagtgctgggattacaggcataagccactgtgcccggcctaattttgtatttttaatagagacagggtttctccattttggccaggctggtcttgaactcccgacctcaggagatccgcccacctctgcctcccaaagtgctaggattacaggtgtgaaccaccgagtcgggccaactgggggcagttctgtcccccaagaggacacttggcaatgtctggagacatttttggtgtcaagactagaggaaggtgctactggcattgagtggtgggtagagatacagatgctaaaaagcatcctacaatgcataggaaactcctcgcaagtgagaaccatctgctcccaaatttcagtagtgttgagg[144 bp omitted]tctactaaaaatgcaaaaattagccaggcatggtggtgggcacctgtaattccagcttgagaggctgaggcaggagaatcgtttgaacctgggaggtggaggtggcagtgagccaccactgcactctagcctagacgacagagattgcaccactggcactccagcctggatgacagagggggactct[142 bp omitted]aaaccctgtctctactaaaaatacaaaaaattagccgggcgtggtggtgggtgcctgtagtcccagctactcaggaggctgaggcaggagaatggcatgaacccgggaggtggagcttgcagtgagccaggatcacgccactgcacttcagcctgggcgacagagcaagactctgtctcaaaaacaaaacaaaaaacaaaaaacttttctccaaacttcagggaactcataaacatttcaaaattatattttcctttcaggtataaaacaccctgttacacatgtctctggtgataattgttgttatactggaagtttgttttgtgtggtaagtataagtgtataattgttcatttttttttgctctcctct[132 bp omitted]gaaaccccatctctacaaaacaataaaataattagcttggtgtggtgacatgtgcctgtagtcccagccacagcaggaggattgcttgagcccaggagatcgaggctgcaatgagccgtgattacaccactgcactccagcctgggcaactagcaagactctgtcaaaaaaaaaaaaaaaaaaaaagactgggcatggtggctcatgcctgtagtaatctagcattttgggaggccgaggtggaatcacctgaggccaggagctcgagaccagcctggccaacatggcaaaaccctgtctctactaaaaatacaaaaaattagccaggcatggtggcgtgtgcctgtaatcccagctactcaggaggctgaggcaggagaatcccttgagcctgggaggcggaggctgcagcgagctgagattgcaccattgcactccagcctgggcaacaagagtgaaactccatctcaaaaaaaaaaaaaagaaaaaagataaagaaataaggacagtgtaaggcttgagactgggtctcaagaacttggtcagtgttatttcccatgggctcagagcacagttgggagatggaaaaggttttggggacgttttcagatccaccggctgacactataaatacatccatctatagttgacctttgaacaacgtataggttagaggtaccaccctccaccccacacagttgaaaatccacaggtaactttcgacttccccaaaacttaattactgtccaggcgtggtggttcatgcctgtaatcccagcagtttgggaggctg[133 bp omitted]gctaatatgggcaacatggtgagaccttgtctctactcaaaatacaaaaaaaaaaaaaaaaaagaaaagaaaaaaatagctagatatggtggtgagcacctatagtcccagttactcaggtcgctggggtgggaggatggcttgagcccagaaggcgcaggttatagtgagctgagatcatgccactgcactcggctggggcaatagagccagaacttgtctcgaaacaaaaacaaaccaaaaaacaaacttaattactaatagcctactgttgcctggaagcctcactaataacataaacagtctatgactgtcacccagggtagagtgcagtggcgcaatctcggctcattgcaacctccgcctcccaggcttcagtgattcccctggctcagcctcctgagtagctgggactacaggtacacagcaccacgcctggctaatttttagtacaggtggggtttcaccatg[135 bp omitted]gacagggtttcattatgttggtcaggctggtcttgaactcctggcgtcaactgatccgcccgcctcagcctcccaaagtgctgggattacagttgtgagccaccacgcccagcctaactttggtattttttaggagagatggggtttcattatgttggccaag[137 bp omitted]cagacatccaggtttttttcagtcatgagttttcatttctctgggataaacgttcaggaacgtacttgctggcatctttctttcattctttctttcttttttttttttatagcatgtcagtaatttggtttttgcatatttccgtggagatcagatatcccagacttatatatattattcaaatactgggggattcagtttttggaagtatcactatgacagacaggtatgttaaatttggtaagaatgtgaaaataaatacatatgtaccttgtgattgtagtaattgctgtcaatgggtgcgtgagggtgttttcctctttaagagtccaactgggacaggagtggtggctcatgcctgtaatcccagcactttgggaggctgaggcaggaggatagcttgagcccaggagtttgagaccggcctgggtgacatggcaagaccccatctctacaaaaaataaaaaaaataaataaattagtcaggtgtggtggcgtgtgttttagtcctagctacttggaaggctgaggtgggagggtcactggagtctgggagattgaggctgtggtgactatgatcacagctctgctctccagcttgagtgacagagcgagacctcatctcaaaaaaaaaaaaaaagtccactggctgggaggttagggaaaattccaggtcaatggagccagctcaggagcctaggaagttagagacaaaaagttttaggtcaggcaaaatcatggcaccatttatgccatttaagtagtacttataaaaagctagtgacaggccaggtgcggtgcctcacgcatgtaatctgagcactttgggaggccgaggtgggcagatcacctgaggttgggagttcaagaccagcctgactaacatggagaaaccccgtctctactaaaagtacaaaatgggctgggcgtggtggcacatgcttgtaatctcagctactcgggaggctgaggcaggagaatcgcttgaacccgggaggcagaggttgcggtgagccaagatcacaccattgcactccagcctgggcaacaagagcaaaacagtgtctcaaaaaaataaaataaaataaaataagctgggcgcagtggctcacgcctgtaattccagcaatttgggaggccgaggtgggtggatcacctgaggtcaggagttcgagaccagcctgaccaacatggagaaaccccatctctactaaaaatacaaaattagctgggcgtggtgcctcatgcctgtaatcccagctacccgggaggctgaggccggagaatcacttgaacccaggaggcggaggttgcagtgagccgagatcgcaccagtgcactccagcctgggcaacaagagcgaaactccatctcaaaataaataaataaaataaaatacaaaaactggctgggtgtattggcggacgcctgtaatcccagctatcgggaggctgaggcaggagaatcgcttgaacccgggaggcagaagttgcttgagccaagattgcggcactgcactccagcctgggcaacagagaaactccgtctcaaaaaaaaaaaaaaaaaaaaaaaagctagcgcccagccgtgtagggacatggtggctcacacttgtaaccccagcactttgggaggctgaagcaggtggatcgcttgagtccagtagttaaataccagcctgggcaatacggggaaaccctgtctctaccaaaaatataacaattagccgggcatggtggtgcatgcctgtagtctcagctacttgggaggctgaggcaggaggattgtttgagcctgggatgtggaggttgcagtgagctgagacaacgccattgcactgcagtctggatgacagagtgagaccctgtcttaaaaaaaagaaaagaaaagaaaaaagctaatgccctagtaaaggcaacacattaacttatgacacacccacatgcccacctgaagattggtactatcaggttcatcatcatgctcactttacagatgagaaaactgtagcgggttgaaccaatgtccccccaaaatttatgtcaacctggaacttcagactctaactgtctttggcatttttgctgctgtaacaaaatatctgagaccgagtaatttataaggaacagaagtttacttgtcatggttctggaggttgggaagtccaagatcaagacgccagcaaggttgttttctggtgaaggctgcaatctgctcccaagatggtgcctatgttggggggtcctctggaggggcaagagccacgtcctcacacagcagaaggcagaagaaccaacgaacagtgctctcttcaacgtagagctcttttataaggatgctcatcccaaagaccatacattgatagtacattggggatttcagcatgaattttggaggggaaaccatcattcaaaccatagcaggaaactgacttggaagtagggcctttgcagatgtaatcagttaagctagaatgaggtcacattgaaatcaggtggccttcaaatcaaatgaccgctgtccaggcgcggtgcctcagcctgtaatcccagcactttgggatgctgaaggcgggggggggggggtggtgtggatcacttgaggtcaggagttcaagaccagccaagccaacttggtgaaaccccgtctctactgaaaaatgcaaaaattagctgggtgtggcggctggcgtgcctgtaatcccagctacttgggaggctgaggcaggcgagtcacttgaacttgggaggtggaggaggttgcagtaagcccagatcgtgccactgcactccagcctgggtgacagagtgaaactctgtctcaaggaaaaaaaaaaagaacaaacaaaaaaaacaaaaaaggaaacctagcatcactaaaattcccaattattactaaaatagcgtttgtgtgtgcgtgtgtgcgcgtgtgtacgtgtgtgaacgtgtgtgtgcgtgtgtgtatgtatgtgaacgtgtgtgcgtgtacatgtgtgcatgtgtgtacatgtgtgtgcgtgtgtgtacgtatgtgaatgtgtgtgggtgtgcgtgtgcatgtgtgtacgtgtgtgtgcgtgtgtacgtatgtgaatgtgtgtgtgggtgtgcgtgtgcatgtgtgtacatgtgtgtgtgtgcatgtatgtttgtgcgtgtggcagtggaattgtttttatcacggacatttcaagaggagaggttaccgcagagaatagttgagctctcagcactgctacagccaggacaagagtcagc[131 bp omitted]tgagacccaccccccaccatatctacaaaaaattgaaaaagaaatgagctgggaatggtggtaggtacctgtggtcccagctactcagggggctggaggattgcttgagcctgggagactgacgctacagtggggtgtgatcgtgccactgcactctagcctgggggacggagagatatcctgttgcaaaaaaagaaaaagaaaagaaactggttggagtgatggagcaggatctagagtcccttccaggggcagatggatcccataattgcctaatgggataggtggagggagggtcttgaaggcaggtagaataatagacccccaaaggtgtccacatcctaattcctggaacctgtgaatatggttcctgacatggcaa[134 bp omitted]atggtgaaacctcatctctactaaaaatacagaaaattagccaggtgtggtggcaggcgcctgtaatcccagctactcgggaggctgaggcaggagaatcgattgaacccaggaggcggaggttgcagtgagctgagatcacaccattgcactccagcctgggcgacaagagtgtaactctgtctcaaaaacaaacaaggccaggcactgtggctgatggctgtaatcccagcactttgggaggccgaggtgggcggatcacctgaggtcaggagtttgagaccagcctggccaacatggcgaaaccccgtttctactaaaaaaacagaaattagccaaatatggtggcaggtgcctgtagtcccagctacttgagatggggaggcagggaggattgcttgaacccaggagacagaggttgcagtgagccgaggctgtgccactgcactccagcctgggcaacagagtgagactccatctcaaaaaaagaaaaaaagaaaaaagatagcagtcttagtctctctgtctctgtctctctctctctctcttcctctctctctctcttcctctctctctctctctctctctctgtctctgtctctgtctctgtctctgcaagatgtgggaggtagccagctgggctgctatggaaatctgtctcactatccctaggtggggcccttgattcctgttccaagtcagctgctagacactttgctgtccagctaacaatcaggaatgaggactcccaggcaggaatgaaagactcaggcagccttctagcagtctgggtcatatcattttctccaaacacccaaaccaaagctgtcttctttcaagtttttgccccaagtgtcacatttcttttcttttcttttttgagacaaggtctcactctgtcacccatgctggagggcagtggcatgattgtggctcactgcaacctctgcctcccgggttcaagtgattctcctgcctcagcctcctgagtagctgggattacaggcgcctaccaccacacccggctaatttttgtatttttagtagagatggggtttcaccatgttgaccaggctggtctcgaactgctgacctcaggtgatccacccgcctcagccacccaaagtgctgggatgacaggcgtgaaccaccgcacccaattgagtgccatatttccacagagggcattatttgtttttctaaaaaagactttccttcattgtaacttattagataatctgaagttaaaccgacaaacacatgtgtattaagatttattcatctgaagtcttttctgtttgtttcataggcagaaatcattgggtctttaggcggaatcttccactttttttctttgtcacaggttgcgatgcttgtagtgaatcaagggaaggtaagtaactgcagagggaagaactactcagaggacctttgcccaagcccaggtttttgttacaactcgcacatttttaaacatttatttatttatttaatttttttttagacagagtctcgctctgtcagccaggccggagtgcagtggcgcaatctcagctcactgcaacctccacctttcaacttcaagcaattctcctgcctcagcctcccgagtagctgggactatgggctcgtgccaccgcgcctggctaatttttgtatttttagtagagatagggtttcaccatgttggccaggctggtctcgaactcctgagctcaagtgatccacccaccttggcctcccaaaggcctgggattacaggtgtaagccacggcgcccggcatcgataatgtatttttgtttaaccattttaaaatagtatcttttctttttttatttatgtgagactgattctcactgtgtcacccaggctggagtgcagtggtgtaatctgggctcactgcaacctctgcctcccgggctcaagtgattcttgtgcttcagcctcctgaatagctgggattacaggtgcctgccaccatgcccaggtaatttttgtattttcagtagtgacagggtttcaccatattggccaggctggtctcaaactcctgacctcaagtaacccccaccctccgccgccgcggcctcccccagtgctgagattacaggtgtgagccactgcgcctggcccaatggtaccatttcagtatgtaatcaatataaacaactcatggatgagatagtttacatttttctgtactacatcttcaaaatgaggccgggtgcagtggctcacgcctgtaatcctagcactttggaagtccgaggcgggcagatcatttggggtcaggagtttgaaaccagcctggccaagatggtgaaaccccgtctctgctaaaaacacaaaaaaattagcccggcacggtgtcaggcacctgtaatcacagctacttgggaggctgaggcaggagaatcacttggacctgggagatggaggtggcagtgagccgagatcgtgccactgcactccagcctgggcaacagagccagactccacctcaaaaataaaataaaataaaataaaataaatcttcaaaatgcattgtgcatttgacacttagagtaattctctattcagaactaaattttcaatggttaaactgaaatgtaaccctagcaaaacaataaagttgtatttaataaaaataaaaaaagaaaggcagacttgtggcttctttgctttctttgctttcccctgcacctgctagccagactcctcttccctcattaggactcagtgggactccacagtagggtttggggagaggctgaatggtgtctttttctcccagggcatgttcaagtactcagatcaccccctcaaccggagtttcgggctgtcttttgactataatgggactctagacatcctcatcgcccccggccagagaggcatcctgctcctatggtttgagaacagcctgttgttttcccataatgcaggtgagcccaggggcccagggtggggctgccgcctggtggcctcctccagaggggccgagtacagcctggataaggggaggggaaggagcaacccctcgaccactcggttattttttctcttccatgttcagagtggaccacaagcccataatcatttagtggatctctctgcatcctccctagcttcctggcttgcaggatacttagggccaggtagacagtgacaactgaaataagtgacggtgacaagagtctccgtcatggaggtttattccgccagctttaggtcgcgtctgggaaaaacgccagtcagacaactctgaggctgcttttccagagttccaggaggcttcgtatttaacatttctttctcttttttttttgagacggagtctcactctgtcgcccaggctagagtgcagtggcgcgatcttggcccactgcaagctccgcctcccgggttcacaccattctctggcttcagc[224 bp omitted]ggagactttagttcatgcacagtaaagttcctgtttttcttttttttttggagacagtgtctcactctgtggaggcggaagctgtgccgagtcctgattgtacttctgcacccaggctggaatgcagtggtgcaatcatggctcactgcagcctccaccttccctgggctcaaacgatcctcccatctcagcctcccaagtagctggctacaggcatgtgccaccatgcctggctgatttttttgtattttttgtagagactgggtcctcctgtgttgcccaggctggtctcaaactcctggcttcaagcaatcctcctgccttggcctcccgaagtctggatattacagctctgagccgctgtactcaacctgttttatcctcacaatggtttccctttttttttttttttttttttgggacacagtttcactctgtcatcgagactggagtgcaatggtgcaatcgtggctcactgcagcctccccacctctcaggctcaagtgatcctcctgcttcagcctcccagtaactgggactacaggtgcgccaccatgcataactaacttattttttgtagagacggggtttcaccctgttgcccgggctggtctcaaactcctgggttcaagcaatcctctggcctcagcctcccaaagttctgggattacagatgagagccaccaaacccggcctgttttattccttatagtggtcacctgtattagaagacattccattgtgttcaagcccctggttgacaaaaaactcaatggccatccctctgagcttgcttatagagaagattaacggggatctggttttcttttttcttttcttttttttttttttttttttgagatggagtctggctctgtcgcccaggctggagtacagtggcgcaatctcggctcactgcaacctccacctctgggttcaagcaattctcctgcctcagtctcccaagtagctgggattacaggtgcgtgcaaccatgctcagttaatttttgtatttttagtagagacaaggttttgccatgttggccagcctgatctcgaactcctgacttcaagcgatctgcccacctcagcctcccaaagtactgggattacaggtgtgcacccccgcgcctggcagaagggttaggttttcttaaaccgaagcatattccttgtcatgcttaacaaaattgtgtttcagtgctgtattctccttgattcattctcctttgaatagcaaacctctcaaaagctataaggaacatcgaaagagccactggccgggtgggttgggtggtggcaggggtggctgtggtcccagtagtagacatcccctttcccaggatgtacacggggcctcatgcacctgtcctgttacctcctaggtcagctcgtcgacaccgtccgggtgaaaaaaggagaccagaccttgttttcttccatttttgaagccaagatcaccatccacaacattgctgtcagtgcgtagccgacccactgctagccaagaaatatttagacctggcttattaaccgtaggcctgccagacccaa[134 bp omitted]tctactaaaaatacaaaaataagctgggcgtggtggtgggcgactataatcccagctactcaggaggctgaggcaggagaatcgctggaacccgggaggtggagtgagcagtgagcagatcgcaccatggcactccagcctgggcgacacagtgagactccaaaaaaaaaaaaaaaaaaagcttcaactctgtatttttttcatattgcttggcatttccacatgaattttgtgattataaccagaaaatagctgtcatattattcttttttttttttttttttttgagatggagtttcaatcttgttacccaggctggagtagtggcgtgatctctgctcagtgtaacctctgcctcctgggttaaatgattctcctgcctcagcctcctgagtagctgggactacaggcgcgcaccaccatgcccggctcatttttgtatttttagtagaaaaagaggattcaccatgttggccaggctggtctcaaactcctggcctcaagtgatccacccccctcggcctctcaaagtgttggaattacaggcgtgagccactgcacccaaccacacttatgtttttgtccacagaaatgaccagcatttcaatttttgttttgtcttgttttgtttttcccagctgaaaatgaactggcagttataactcgggaggataatttgtattatggcaatctgggcatcgtgccaagttccataatcaaagtaggtaaaaagaaagtggggttatgggctgggcacggtggttcacgcctgtcatcccagcactttgggaggctgaggtggaaggatcacctgaggtcaggagttcaagaccagccttgccaacatggtgaaaccctgtctctactaaaaatacaaaaattagccgagcctggtggtgggcacctgtaattccagttacacgggaggctgaggcaggagaatcgcttgagcctggaaggcagagtaagactctgtctcaacaacaacaacgacaacagaaagtggggttatgaattagttggtaaggaataatggtcttgttcacaaacttctgaaccttttttcgaaggctagaaatcactctagttagtaaaacaacaacaacaacagcagctaaaaggggaagagtatttaaaatactataggtgctggtctaggcaccttcgtgtattacattatttaaccttgaccatcatcttaggaagctcctcatatcgtccctatttgacagatggaaaaactgaggcacagagacctaagtcgtctgtccaggctcaaagtggtactaagtggtggtgcaggtgtcatctgacatcctcttgtgcattatgcctatctaattttttttttttttttttgagatggagtctcactctgtcgcctagcttggaatgccacagcacaatcttggctcactacaacctccacctctcaggttcaagcaattctcctgcctcagcctcccgagtagctgggattacaggcgcatgccaccacaccaggctaagttttgtaattttagtggagtcagggtttcaccatattgtccaggctggtcttcaactcctgacctcaggtgatccacccgcctaggcctcccaaagtgctgggattacagtcgtgagccaccgcgcccggccgaaactctgtttcttaaaaataataataaaactaacaaaaatttaaaataaaagaattattttggccgggcgtggtggctcacgcctgtaatcccagcaccttgggtggccaaggtgggcggatcacgagttcaggagatcgtgaccatcctggctaacacggtgaaaccccgtctctactaaaaaaaatacgaaaaaattagccgggcgtggtggcggcacctgtagtcccagctactcgggaggctgaggcaggagaatggcgtgaatccaggaggcg[140 bp omitted]tggttccaggagttcatgaccagcatgggcaacatagtgagaccccgtctctactaaaaatatgaaaattagctgggcatggtggtgcatgcctgtaatcccagctactcgtgaggcaggagaatggcttgaacccgggagacggaggttgcagtgagccgagatcgtgccactgcactccagcctgggcgacagagtgaggctccatctcaaaaaaagaaaaaaataataattaccaaaggatgaatgaagctgaagagaagttagatcacaagttgtccttatgactgtgtttcctccctcccccagccctctctcccttctttcctttcttccttcctttctctttctctcttcctttctcttttctttttctttcttccctctaccttctttcaatctgcatcatggccgggcgtggtggctcatgcctgtaatcccagcacttttgggaggccgaggcaggtggatcacgaggtcaggagttcaagaccagcctgatcaacatggtgaaactcgtctctactaaaaatacaaaaattagccgggcatggtggtgcgactgtgatcccagtgactcaggagaatcgcttgaacccgggaggcggaggttgccgtgggctgagattgcgccactgcactccagcccaggcgacagaacaagattccgtctcaaa[132 bp omitted]gctaacacagtgaaaccctgtccctactaaaaaatacaaagaaaaaaaaaattagccgggtgtggtggctgcgcgtctgtagtcccagctactcgggaggctgaggcaggagaatggcgtgaacccgggaggcggagcttgcagtgaaccgagatggcgccactgcactccagcctgggagacagagtgagactccatcaaaaaaaaaaaaaaaaaaaaaaaaaaaaaaaaaaaaatctgcatcatgaaataaaatttaaacctccagaaaaacaattacaatgattagatctcaggaatcattttcttcttagtttgcagaccaatacatctggtcagaagacgtggccctgatgttcaggagcccagggactctggaaatactgaccccactgcgtgacacagcctttccagcttttgatttccagaagtgcctcgtgaatatccaggcgcttctcatggaccctgaactccacgttggaaagtgcaaggtatgtgatcctaactgttttgatcaatgttcaatgtagtttttaaagacaaattcaacctgggcatggtggtgcacgcctgtagccccagttgctcaggaggctgaggctggagggttgtttgaggccaggagttcaagaccagcctgggcaacatacacccatttctaaaacaaaaaaaaatttttttttaaagctgggcgttggccaggtacggtgggagactttggagactgagtctttgggagactgaggcaggtggatcacttgaggtcaggagttccagaccagcctggccaacatggtgacaccccatctctactaaaaatacgaaaattagcttggtgtggtggcgggcgcctgtaatcccacctacttcgagtgctgaggcatgagaatctctttaacctgggaggcagaggttgcaatgagccgagatcacaccactgcactccagcctgggtgacagagcgagacttcgtctcaaataataaataaataaataaataagttgggcatggtggtgtgtactctcagttacttgggaggctgaggtgtggggatcacttgagcccaggagttcgaggctgcagtgagctatgatggagtcactgcactccagcctgggtgacaaaatgagatcctcgtttctaaaacactaatttaaaaaaagagaaattaacaaaataagagacaacaagatagtattcgtcaccaataagagatcaatcacatcacccattgaccactgccaacacgatcaaactcaatctcatgaggcaagcatcaatccagctgcaaatttgccagaaatacaaaagacagaggaatgggttcacctgcaccagggaaatccagattttgagaaatgctgcgggcccaacagcgtggggacttccaaaatccatggaaaggaaaagggggccgggcgtggtggctcattcctgtaatcctaacactttgggaggccgaggcgggcggatcacctgaggtcaggggttcgagagcagcctggccaacatggcgaaaccccgtctctactaaaaatacaaaaattagatgggcgtgctggcacatgcttgtaatcccagctactcaggaggctgaggcaggagaatcgcttgaacctgggaggcagaggttgcagtgagccgaaaccaagccactgcactccagcctgggtgatggagtgagactccatgtcaaaaaaaaaaaaaaaaagtagattttgtagagacaggagtctccctgtgtggtccaggttggtctcaaacccctgaacttaagtgattctctacccctcaggattacaggtgtgagccactaaacccagccaacaaacctgtagattgaaagaggattaaaagacatacctgtgttgggaaacgggcaagactgagtgatgatcttcagatgcatactagggcagctctactctaaagaaacagaaagagggggcgggcgcggtggctcacgcctgtaatcccagcgctttgggaggctaaggtgggtggatcacaaggtcaggagatcgagaccttcctggctaacagtgaaaccccatctctaccaaaaatacaaaaaaaaaattagctgggcgtggtggtgggcgcctatagtctcagctacttgggagactgaggcaggagaatggcatgaaccccggaggcagagcttgcagtgagccgagattacgccactgcaccccaacctgggcgacagagccagactctgtctcaaaaaaaaaaaaagaaacagaaagaggtcaggcgcagtggctcacaactgtaacctcaagcactttgggaggccgagatgggaggatcacttgtgcccaggaatttgggaccagcgtggcaacatagtaagcccttgtctctattaaaaaaaaaaaattgaattagccgggcatggtggtgcacgcctgtagtcctggctacttgggaggctgagggaa[134 bp omitted]gtcagggttggggaatacttctggagaggagggaggggctggcattgtgcccatctcgagacccttctggaaatacagagtctagtggggaagacagaggcacaagtggagattcaggctgcaggaccaggagggtcccttcctccttcccacctccttgccctttctttatgggaacaggagcatgattatctttcttcttcgcctttttaactagatagagtttctgacaggagaatttatatacaggatgtataccattgacatgcacagccagctggaattgactgcttcgttgataccccagccaggcacatccctgattcctctggtaagtacatcttaatgtttctgctatctgggattctcagccacatgcctggtgcccactcccagattctggaaatcccctggcatcccccacaagga[131 bp omitted]tgcagcctccacctcctgggctcaagcaattctcctgcctcagcctcccgagtagctgggattaccagcatgtgccaccacgcctggctaattttgtatttttagtggagacggggttcccccatgttggtcaggctggtcttgaactcctggtctcaagtgatctgctcacctcggactcccaaaatgttggggttacaggcatgagccaccatgcccagccatttctatgtgtcttccccctcgacgtgcctctgcatgtctgggcgtgatgaggctgtggctgtccagctggccgcctggccgcccttgtgctgtctctgtgcctcctccatccttctgagctgcccatacattcattttcttcttcttctttttttttttttttgagacagagttttgctctgtcgcccaggctggagtgcaatggcacgatctcggctcactgtaacctctgcctcccgggttcaagccattctcctgcctcagcctcccaagtagctgggattacaggtgcctgccatcatgcctggctaagttttgtatttttagtaagatggggttttgccatgtt[135 bp omitted]agctaagagccctgacccctatggccttcccccacccagcaggaagtgtttggatgtttctcgatccaaaatccaagtgtctaagcctaggcattagctgcaagtacagatggtcccacaattttttgactttacaatggcacaaaaccgattatactcagactattgagtattatactcaatatattatactcaaaatattgagtatacaaaaactattatactcaatagaaactgtatttccagtactgatacagcctttctgtttttcactattagtatagtattcaataaattacatgagggccgggcgcggtggctcccgcccgtaatttcagtacttcaggaggctgaggtgggaagatcgcttgaacccaggagctcgagactagcctgggcaacatagtgagactccatctgtacaaaaaacataaaaattattagccgggtgtggtggcgcatgcctgtaatcccagctactggagaggctgaggcaggagaatctcttgaacccaggaggcggaggttgcggtgagccaagatcgtgccattgcactccagcctgggcaacaagagcgagactctgtctcaataaataaataaataaataaataaaaataaattaaaaaaataaaaattagccaggtgtagtggcatgcacctgtagtcccagctacttggggctaaggcaggaggctgaggcaggaggatcacttgagcccaggaggttgaggctgcagtgagctatactcatgccattgcactccagcctg[140 bp omitted]atagtgaaaccccatttctactaaaaatacaaaaattagccgggtgtggtggcacatgcctgtaatccccgctactcaggaggctgacgtgggagaatcacttgaatctgggaggtggaggttgcagtgagctgagaccatgccactgcactctagcctgggtgacagagtgagactccctctcaaagaaaaaaaaaaattaaataaataaataaaaataaaaaatttaaaagtaggtaaattattgcttcatgaggacagagtttccatttgggactatgcgaaagttttggaaacagatggcagtgatggttgcacgatattgtgaatctaccgaaagccactgaattatacactaaaggtgggtaaattcatccacatgtattatctatttgtacaaacattcaggaaagctggacccctgaaatgtcaacatcgtgatccaaggggtggaagggcgagtgggttttgttctccttttagtattgcttggtttattctcaatttaaagtaggctgggctaacttccaatgcttg[131 bp omitted]tgaaacctcgtctctactaaaaacacaaaaattagctgggtgtggtagcgtgcttggaatcccagctactcgggaggctgacacatgagaatcgcttgaacccaggaggcagaggttgcagtgagccaagatctcaccactgcactgcagcct[140 bp omitted]tggccaatatggtgaaaccccatctctgctaaaaatacaaaaattagctgggtgtgttggcgcatgcctgtaatcccaactacttgggaggctgaagtaagagaatcactggaacccaggaggcagaggttgcagtgagctgagtttgcaggactgcactccagcctgggtgacagagtgagactccatctcaaaaataaagaaagaaagaaaataataaataaatgcattttcaacttctttttttttttttttttgagacggaatcttgctcttgttacccaggcgggagtacaatggcgtgatctcagctcaccgcaacttttgcctcctgggttcaagcgattctcttgcctcgggctcccgagtagctgggattacaggcatgcaccaccatgcctggctaattttgtatttttagtagagatggggtttctccatgttggtcaggctggtctcaaactcccgacctcaggtgatccacctgcctcggcctcccaaagtgctggaagtacaggcgtgagccaccgcgcctggccaaattttttttttttttttttttttgtagagacaggatctctctgtgttgcccaggctcgtcttgaactcctgggctcaagcagtcttctcaccttggtctcccaaagtgctgggattacagatatgagccactacacccagccctgatttttcatttgaaggtgtgctgggctcactgtgggggtttgtcaccccgtcctgcctgctggctccgtacagcctgagcttctctcccccactcccaggtgatggtgagcaacccccactccctggggttccaggccaccttctacgagaacggttacacatcagatgggaacaccaagtacaaactggtgagccgcgtccccaccaaaccctgtcgcctgtcccttgagaggccccctcttcctccttcccttatcagcataaaaatttaggagtttccagggtacatagcccgtggccgtgccccgcggtgggaagatgatcaggcagccgtcaaccacacgcttgacctcattaaagtgtcacacgggagagacccggatggcatgacagggaggagcctaacccagcccggggagggtagccggagatctgagttagttgggtaaactgaggcatgaggattgcgtgggggcagtttccacagggcaggggcctgaccaggtgcaagttggtgacagcaaactcctttaaccaggctcgtcacatcacatccaggtgagtgagaaaacagtcactcctcactgtgggtccccagaactcagggagcaagggaataggagccatcatattggggccgttgtttctgtgagcttccagaagcctttcacaggcggtgggactagaacagagcagggcttggctgggcgcagtggctcacgcctggaatcccagcactttgagaggcca[137 bp omitted]actcgggaggctgaggcagg[135 bp omitted]ggtaacgctcacctgtagttccagctacttgggaggatgaggcaggagaatcacttgaaccagggaggtggaggttgcagtgagccaagatcgtgctaatgcactccagcctgggcaacagagagagactccatctcaaaaaaaaaaaaaaaaaaaaaaaggaacagagtggggctaagcggcttccaggttcgtccccccatgtcccctccaacaccccatctctcccaatgtcctgagttggggatgcccatggtgttccacggatacacttgggattttctctcttgaccccacaggatattttcctaaaacagcagcagcactggggcaggaccgactccaacttcacttccaggtatgttgtctcctgggagaggcggggactgggctgcctacaggggtttccttagcaggagcgaagagaagcaggtctgagatcagacccccagctccagaacagtaaaacaaggcgattacaacactttacaagagctgggcgcggtggctcacgcctgcaatcccagtactttgggaggcagaggtgggtggatcacctgaggtcaggagttcgaaaccagcctagccaacacggtgaaaccccgtctctactaaaaaataaaaaaaaattagctaggcgtagtggcaggcacctgtaatttcagctactcgggaggctgaggcaggagaattgcttgaatccaggaggcagagggtgcagtgagccgagatcgtgccattgcactgtagcctgggcgacaaacatgaaactccagctccaaaaaaaaaaaaaaaaaaagcaaaaataagccaagtgtagtggcgggcgcctataatcccagctactcagggagatatttgcacacctgtgctcacagcagcgtgattcacaacagtcaaaaggcaaaaatcaacccaccggtccatcaccagatgaaaggatgaacacagcgtggtccatccgcacatcgcaatatgactcagacttaagaaggaagggagtcccgggccgggcgcggtggctcacacctgtaatcccagcactctgggaggtcaaggcgggcagatcacctgaggtcaggagttcgagaccagcctggccaacatggtgaaacccccatctctactaaaaatacaaaaattagccgggcatggtggtatgcgcctgtaatcccaggtattcaggaggctttggcagaattgcttgaacccaggaggtggagcttgcagtgagccgagattgtggcactgcactccagcctgggtgacagagtgagactccatctcaaaaaaaaaaaaaaaaaaaaaaaaggccgggggctgtggcccacaacactttgggaggctgaggcaggtggaatcccaacactgtgggaggctgaggcggacagctcacaaggtcaagagatcgagaccagcctggccaacatggtgaaactctgtctctactaaaaatacaaaaattagccaggcatggtgacaggcgcctgtagtctcagctactcgggaggctgaggcaggagaatcgcttgaacccgggaggcagaggtttcagtgagccgagattgcgccactgaactccatgctaggtgatagagcaaaactcgttctcaaaaaaaaaaaaaagtaagggaatcctgacgcaagatacaggctagattggatgcaccttgaggacaacatgctcagtgcaataagccggatacaaaaggacaaatcctgtgtgattccactcctaggaggaccctagagtggtctgagtcacagagacaggaagtaggatggggggtgccaggggctggggagggggatggggagtgagtgtttcatgaggaccaagtttcagttggggaagatgagaaacttctggagatggatggtggtgatggttgcacaactctgtgaatgtagttaatattgatgaatggtgcacttaaaatggttaagatggaaaatttggggcccggtgtgacggctcacgcctataatcacagcaactcaggagatccatagcaactcaggagactgaggcaggaggattgcttgagctcaggagtttcaggttgtagtaagttatgggcatgacaatgtactccagcctgggcaatagagcaagaccctgaccctgggcgacagagcgagacccccatctcaaaaaaaaaaaaaatttctgaatgctgactgaaagccttctatcgagttttcactgcttcttgagtcagttttgtgaagttttttttatttgttttgtttttgtttttttttttgagacgaagtttcactcttgttgcccaggctggagtgcaatggcataatcttggctcactgcaacctccgcctcctgggttcaagccattctcctgccttagcagtggcatgatctcggctcactgcaatctctgcctcctgggttcaaatgattctcttgcctcagcctctcgagtagctgggattataggcatgtgccaccacgcccagctaatttctgtatttttactagagacggggtttcaccatgttagccaggctggtcttgaactcctgacctcaggtggtccgtccgcgtcagcctcccaaagtgctagaattacaggcatgaaccaccgcacccggccagtgttcagaaattaatggatggatggatggatggatggatggctggctggctgcctggctggctggatggtgtattagtctgttttcacagttttcagaactatctgagattgggtaatttataaagaaaagaggtttaattgactcacagttcctcaggcttaacaggaagcacgacttgggggtcttaggaaacttacaatcatggcggaaggcgaaggggaaacaaggcatgtcttctcatggcggcagaagagagagagagagagagaatgagagagagagaaactatcatacattcttttttttttttttctgagatggagcttcgctcttgttgcccaagctggagtgcaatggcacgatctcggctcactgcaatctccacctcctgggttcaagcggttctcctgcctcagcctcccaagtagctgggactatagttcccgagtagctgggactacaggcgtgtgccaccacgcccggctaatttttgttgttgttgttgtatttttagtagaaatggggtttcaccatattggcaaggctggtcttgaactcctgatctcaggtgatgtgcccgccttggcctcccaaagtgctgggattacaggtgagagccactgcgcctggcctgccatatatatatatatatatttttttttttttttttttttttgagacacagtttcactctgtcgcccaggctggagtgcagtggtgtgatcactggtcactgcaacctccacttcctgagttcaagtgattcttgtgtcttggcctcccaggtagctgagattacagacacacgccaccatgcctggctaatttttgtattattagtagagacagggtttcgccatgttggccagaatggtctcgaactccttacctcaggtgatctgcccacctcggcctcccaaagtgctgagattacaggcatgacccactgaggccagccccatacacttttaaactatcagatattgtgagaattcactcactatcacaagaacaccaagggggaaactgccaccatgatccaatcacctcccaccaggtccctcccctgacatgtgaggattacaatttgagatgagatttgggtggggacatagaaccaaaccatatcagaaggataaatgggtagacagatgagtggatagatggatagagagatggacggatggttgggtggatgggtggatgggtgggtggatggatggatggatggatggatggataaatggatagatggatgagtgaatagatggatggatgggtgggtggatggaatggatcgataagtgggtagatggatgagtggatggatagagagatggatgggtggatggatggatggataggtgggtgggtggaatgaatggatggaaggatggatgagatagatggatggatggataaatggatagatggatgagtggatggatggatggataggtggatggaatggatggataaatgggtagatggatgattggatggatagagagatgaatagatagatggatggatgaataagtggatagatggatgagtggatggatggatgggtgggtggatggaatggatggataaatgcgtagatggatgagtggatgggtagagagatggaagggtggatggatggatgaatggatggatgggtgggtggaatgaatggatggaaggatggatgagatggatggatggatgcacggatgactgaatggactgaaggatgaatggaatgcagctgtgtcgtttacaggggtgctattctctaataacacaggttccgttgccttgcagtttaaagaaagccaccatgtctaccttaactgtggacatagcaaacaaggaaatttcatgtgtggatatcaagccactggtaggtcccaaatctttgctgtcccatattcggtgtcataagtgttaagactcatggaagctggccctgaggttgcaatgagctgagatagtgccactgcactccaacctgggtgcaagagagtgaaactctgcctcaaaaactaaaaaaattaaaaataaaaataaacattgatggcataaaaaaatttatggatgcatgcttccacatggatgaacctcgaggagatcccacacagtgagagaagccaggcacgaaaggacaaatcctgtgtgattccgctcttaggaggtccctagagtcatcagattcatagggacagaaagtaggatggggggtgtcaggagctgaggaaggggatgattgaagcagttgaaagcaggcagtcaccatgttggccaggctggtcttgaacttttgatcttggatgatctgcccgccttggtctcccaaagctcccacacttacaggcgtgagccactgtgcctgggccatttttgtatttttagtagagatggagtgtcaccatgttggccaggctggtcttgaactccttttttttttttttttttgacatggagtcttactctgtcgcccagactggaatgcagtggtgcgatctcagctcattgtaacctccatctcccggattcaagcaattctcctaacctcagcctcccgagtagcggggattacaagcatgtgccaccatgcccagctaatttttgtatttttagaagaaactgggttttaccatgttggccaggctggtcttgaactcctgaccttaagtgatctgcccaccttggcctcccaaagtgctgggatcacaggcatgagccactgcgcccaacctggtcttgaactcctggtcttgtgatcctcctgcctcagcctcccaaagtgctgggattacaggcatgagcccctgcacctggccaatttttttttttttaagatatgaatcttgcattctgttctaaggtaaatccatgtttgtcttgctttttggtttgctttatttattttttttattttttgagacggagtctcactctgtcgcccaggttggagtgcagtggtgcgatctcggctcactgcaagctccacctcccgggttcacgccattcttctgcctcagcctcccgtgtagctgggactacaggcgcctgccacca[184 bp omitted]gttcaggctggagtgcagtggcgcaatcttggctcactgtaacctccacctcctgggttcaagcaattctgcttcagcctcccgagtagctgggattacaggcaagccccaccatgccgagctaattttttgtatttttaatagaaatggggtttcaccacattggccaggctggtcttgaactcctgacctcaggcaatttgcccgccttggcctcccaaagtgctgggattacaggtgtgagccacagcacctggctgttttttatttgtaggtacagggtctcactctgtctcccaggctgccgcacagtagcacaatcaaggctcactgcagcctcaaccttctaggctcaagtgatcttcctgcctcagcctctcaagtagctgggattacaggcgtgcaccaccacacctggctaagttttatttttcatagagatgaggtgtcactatgttgcccagactggtctctaactcctggcctcaagcaatcctactggctcagcctctcaaagtgctgggattaaaggcgtgagccactgcgcctggcccatgtttgtcttaatacaaaacagttttcaaatactaaaagtcccttggtcctgtggcttttagactccattgtataactctgagggtgccgtgcactgcagtttgagaagcatgtccctaaggctgtagagtaacccccaattgctctctctgtcttctttctcctttttgtttattcattctaggccattgatttattcattcattcattcattcattcattcattcattcattcattcattcatacatgcatgcgtgcatttttttccccatgctctctgtgtaccagggatcatgctgggctcataaattagttctgggcctggcatggtggctcacatctgtattcctagcactttgggaggcccagg[131 bp omitted]gaggcaggagaatcgcttgaacccagggggaggatgttgcagtgagctgagactgggccactgcactccagcctgggtgacagagcaaaaactctgtctcaaaaaataattaattaattaaaagaaaaagttaattctggtctccgtgaagccactaatagctcctcaggcgacaccaggagtttagccataccccaggctctcagagcttaagctccgcggggccagctgcagttacggtgcatcccaggcatccagggacacgctgttgggatccaggccacatggtttccaaaccattcccacaggagtgtgtccctgtatagggttcactgtgtccgggtgaccctcactgacctgggtccatatttctgtctctctcctctgcagtcgacactgatttcagttggctgcgacctggataaaaagatcgtcatccagaagtaagtatgttgaggccgggcaccatggctcattcctgtgatcccagcactttgggaggccgaggtgggcagatcacttcaggtcaggagttcaagaccagcctggccaacatggcgaaaccccgtctctactgaaaaaaaaaaaaaaaattaggcgtggtggcagacacctgcaatctcggctacttgggaggctgaggctggaggatcacttgaacctgggaggtggaggctacagtgagctgagattgagccactgcactctgcactccagcctggctgacacagcaagactctcgtcttgaaaaaaaaaaaaaagtaagtatgttgatattggagtggagtgaggagaggggaggagagtagttgacagggcacgattagccacatggtaacaattgctgaggtggatgactttcgattatttagttttgtatatatttactatttccataataaaaagttaaatgattcaccctaataggttaagtttgtttccagcatgttggcctcccctccttcacctgttggtgatatccacatttttttttttttgagatggagtctcgccctgtcacccaggctggagtgcagtggcacgatcttgactcactgcaacctccgcctcccaggttcaagtgattctcctgcctcagcctcccaagtagctgagattacaggcgcccgctaccatgcctggctaatttttgtatttttagtagaaacggggtttcaccatgttggccaggctggtctccaaatcctgacctcaagtgatttgcccgcctcagcctctcaaagtgctgggattacaggcatgagccaccgcaattggccta[223 bp omitted]gaggcaggagaatggcgtgaacccagga[139 bp omitted]tgcccctcccagagctggggtctctcaggtttttttttttttccatatctgctcatttggcaactgctcatgcattagacgcaaaggtgtgccctcccttttatatattattattattattgagacggagtcttgctctgtcgcccaggctggagtgcagtggcatgatctcggctcactacaagctccgcctccctggttcatgccattctcctgcct[183 bp omitted]ttattttaatttttatcgatttatttttgagacagagtcttgctctgtcacccaggcaggagtgcaatggtgcaatctcagctcattgcaacctccgcctcccaggttcaagtgattctcctgcctcagcctcccaagaagctgcgattagaggcgcgtgatgccacgcctggctaactttttgtatctttagtagagacggggtttcctcatgttggccaggctggtctccaactcctgacctcaggtgatccgcccgcctcagctcccaaagtgctgggcctgagccaccacgcccagcccctccctttctgtcccatccataatggtttggttctttgtgaggtcatgccattgctcaatgtccacttttgcttgcagcaaagtttccgcctgttccatgggcatcctggaccccttgaccctgcaagacaattacagcttcatcatcgagaagtaagccagcgtccccccgcaacacctgacacccaaggcgaccattgggcctgcaaaagccaagagcaaattaggaat[134 bp omitted]gcctcctgagtagttgggactacaggttcccgccaccaggcacggctaatttgttttatttttagtagagatgaggtttcactgtgttagccaggttggtctcaatctcctgatctcgtgatccgcccacctcagcctcccaaagtgctgggattacaggcatgagccaccgcgcccggcctattattattttttaagagatagggtctggccctgtggcccaggctggagtgcagcgatgcgatcatagctcaccacagcctcgacctcctgggctcaagtgatcctcttccctcagctggctggtcccacatgctgtccggctcagtgagcatgtactgccacgcccatacgagagtctgggcctcagtcaatttgtgctgctttaaaagactacctgaggctgggtgatttataaagaagagttatggccgggcccggtggctcacgcctgtaatccctgccgaggtaggcggatcacttgagctcaggagttcgagaccagcctggccaacatggcaaaaccccatctctactaaaaatacgaaaattagccaggcatggtggtgggcacctgtaatgccagctactcgggaggctgaggcaggagagttgcttgaaactgggaggcagaggttgcagtgagccaagattgagccactgcactccagactgggcaacagagcaagactctgtctcaaaaaaaaaagagagagagagagaggagggaggaggctgggtgcagtggctcacacctgtaatcccaacactttggaaggctgaggcaggaggattgcttgaggccaggagtttgagaccagcctgggcaacctagagacaaaaaaaaaaaaaaaaaaaaagagggtggtgggatggggggaggaggtgccaggctcttaaacaagcagttctcatggaagctgagaatgaaaacccactcagtaccataaatatggctccaagccattcatagctctgccgttgtggcctaaacacctctgactaggctcccactccaacactagggatccagtttcagcaggagctttggaagggacaaatatccaaaccatacgaagacccctcattgcacccagcatgagggagctccttgccacgcgagtgcacacttccatgtgatttgtaagacctgagccctcaaatgcaagtcaagagtcagttacccatttagagctgaggcctaaactagtgcttctgggctgctaaggggcagtgactttggaacctgcggaggacacagaggggagtgtcatcttagtctatgtgggctgtattgcaaaatgccttaaactgggtaattt[131 bp omitted]gtgaaatcccgtctctactaaaaatacaaaaattagccaggcgtggtggcacatgcctgtagtcccagctactcaggaggctgaggtgggagaatttcttcaacccgggag[137 bp omitted]agtgggtcacccctgtaatccctgcactttgggaggctgaagtgggtggatcacctgaagtcaggagttcaagaccagcccagccaacatgatgaaacccacatctctactaaaaacacaaaaaattagccgggcgtggtggtgggcacttgtattcccagcttctcaggaggctgaggcaagagaatcacttgaacccgggagagagaggttgcagtgagctgagattgcaccactgtgctccagcctgggcaacaagaatgaaactccgtctcaaaaaaaaaaaaaaaaggcaaaaacctcgattacttttgcactgatctaatttaaggagcagaaattttgctgggcttggtggcttatacctgtaatcccagcactttgggaggctgaggtgagggaatcacttgaggccaggagtttgagaccagcctgggcaacacagcaagacctcatctctacaaaaatttaaaatattaaccatgcgtggtggtgcgtgcctgtaatcccagccactcgggaggctgaggtgagaggattgcttgggcccaggaggtggaggttgcagtgagtcatgactgcattactatgctccagccaaaaaattaactagaacagaagttccaatatcatctggtccatggctctcaatcgcccacctcagatgccacctcctgccactctcatggacgatccccatttgcaaaaaagaaactgcggctgtgaagggttggcagactgggcaggaactcacagactccccatctctgcttcttggtgtcttgaagggaattctacgaccccggcttccaggggcagcagtcctccgaggacctgcacgtgttttactcctaccagcagctgggctgtcctctcctcgtctactatgacaccctatggaagcccgtggtggagctgtaagaccccaggggggtgctgcagggtggggacggtggcagggcctcatgctccctggccctggggtaccagcctggccctccaggctcccctagatccctcaaaatgatgatggtcactgtttcccaccgtgctcctgccccagccccactggcccccagggccctctccctggaacaccttttctttttttgagacagggtcttgctctgtcgcctaggatggagtgcagtggcatgatctcagctcactgcagcctctgtcccttgggctcaagcgatcctcccacctcagcctcccaggtagctgggaccacaggtgcccaccaccacacccagctaattagcagagatttggtttcaccatgttgggcaggctggtcttgaactcctgacctcagatgatccgcctgccttggcctctcaaagtgttggaattacaggcatgagccactgcgcccggccgatgggcttttctttatgcctgtgcactcctgctgtcttcctgttcttttttttttttttttccactctgtcacccaggctggagtgcaatgacatgatcttggcttactgcaacctccacctccagggttcaagcgattctcctgcctcagcctcccgagtatctgggattacaggcgcgtgccaccatgcctggctagtttttgtatttttagtagagatggggttttaccatgttggtcaggctggtctcgaactcctgacttcgtgatccacctgcctcagctttccagagtgctgggataacaggcgtgagccaccatacctggccatcttcctgttcttataaggacaccagtcttatcagatcagggcccaccctacatcctatgacctcatatagcttttctttttcttttcttttttctttttttcttttcttttcctccctttcctcccctcccttccttccttcatttccttcctttctttctctctctctgtttccttttttctttttttttttttgtgttggcgtcttgctctgttgcccaggctggagtccagtggcatgaacacagttcattgcagccttaacctcccaggctcaagcggtcctcctgcctcagcctc[164 bp omitted]ctcctgcctcagcctcccgagtagctgggattacaggcgcccgccactgcgcccggctaattttttttatttttagtagagatagggtttcaccgtgttagccaagatggtctcgatctcctgacctcgtgatcctcccgcttcagcctcccaaagtgctgagattacgggcgtgagccgccgcgcctagctccgagcagacttttccttccaccctgttatcaatgctcagtgctggctgctgcccatctccccatgcacccagctctttctcctggcctccccgcagcccacacacggcatcctcagctgggagcggcaggcgtcctttggtttcctctctgtcacctcccaccccccaagcggttttgcagccgtccaggtggctgtggcccgggtcttcctgggttgtccctgctccctgcacagccctgccccgtgcctgtgtcctaggtggcgaaaagacagtttccaggaggtcatcgacgccgagtatgtgttactggaggtgaacgggcagttctcatactcctattccctgacggcccagtcggccatgtgtacctcccagccgcagaactggaccaccatgataaaggaattcggggggcccttcttctggaacagagaggtaacaggaccctaggatcgtttccagaagaatcagcagcccaccagggggtgggagagtgcgt[139 bp omitted]tggcaaaagcccgtctctactaaaaatacaaaaatcagtcgggcatggtggcggacacctgtactcccagctactcaggagaatcacttgagcctgggaggcagaggttgcagtgagcacagatcacgactgcaaaagactcgaaggtcctttaggggatctagcaggaaccccaattccttttaggggtgtacaaggcctttgaggatttaaggaactgaccgaaggacgggaaatgcaggcaccaaggtgttcagggggctttgctgatgatgagaaatgcctgggaccatcccaatgcttgctactgagggatggatggaattcccgggctgtcttactcagtgtgcatctgttttatttttatttcttttaggcagggtctcactctgtctcccaggctggagtgcagtggtgcaatctcagctcactgaagactcaagcctcaagtgatcctcccacttcagcctcccaattagctgggactacaggtgtgtgccaccatgcccagctaatttttgtatctttttttttttttttttgtagaggcagggcttcagtatgttacacaggctggctttgaactcctgggctgaagcgatcctcccatggattataggtataagtcaccacgctcagcctcagtgtgtatttctatcatacgagtgatgtcctgtccctacaaagagattgcatcagtccacgtgtatcttcccgggacacaatgttttgtatcaggaatgcagtgcatgcagcaaagccaccagcagatggtgtcctggctctttttttgcatttgctttttttttttttttttgagacggagcctcactgtgtcccccaggctggagtgcagtggcgcaatctcagctcactgcaacctccacctcccgagttcaagcaattctcccgcctc[206 bp omitted]ttcttcatatgggctgtctcattgcaaattgcatgagtgcatttaagagatggccccattactattttttttccatcagct[137 bp omitted]caaaaccccgtctctactaaaaatacaaaaattacctgggcatagtggtgcacgcctgtaatcccagttactggggagcttgaggcaagagaatcgcttgaacctaggaggtgaaggttgcagtgagccgaaactgcaccactgcactccggcctgggcaacagagcgaggctgtttctcaaaaaag[141 bp omitted]tgaaaccccgtctctactaaaagtacaaaaattagcagggcatgatggtacccacctgtagttcccgctacttggaaagctgaggcaggagaattgcttgaacctgggaggtagacatcgcggtgatcccagatgacaccactgcactccagcctgggggacagcagaagaaaatgtctcaaaataaaaaagtcattggaagcgcctgactctcacccaggctaagttattaagcctccagcctccacagcccaggaaggcctgaaagcaggcatgtggcagactgccacggttactacttgagacggtcactacaacagttactactgctactacttgagaccttcgttacaagactgaaggaagggggaacgaatgtagaaatgaaaacttaagacaaaagaaactgttttaaagaagaggcatggggaagaagagagctccccgcttctagtgagtaaaggcagtccctcaagcttccacagacctgcgtatttattgagtagaaacagcagggaggggccaggcgaggtggccacgcctgtaatcccagcactttgggaggctgaggtgggtagatcacaaggtcaggagattgagaccatcctggcttacatggtgaaaccccatctctactaaaaatacaaaaaaaaaaaaaaaaaatttgctggccacggtggcgggcacctgtagtcccagctactcgggaggctgaggcaggagaattgcatgcatccgggaggcagagcttgcagtaagccgagatcgcgccactgcactccagcctgggcaacagagtgaaaccccatctcaaaaaaaaaaaaaaaaaaagaaagaaaagaaagaaagaaagagcagggaggagcaggtaacgattggtcagctggttaattgattacaggttcatattattactaataggcttcagatgtaccaaatcagaagaaacactgtgcctggctcgtgaccgccctcagcattccttctgggcggcagacgcagtttgtcagtttgccaacattctgcttttatgagaaagtttgctgtttactcatatggcctccagtggtatacggagttgatcaccaccctcaatctttcggcctccaacagaggcaggtgagatggaggctgagcagcctccatccactcttctctgcagggagcatgaacctgcccacaccatgggcacttggccccagagtcccacccatgcgtgcctaatgaggactggggtgggtgcagggcctccgcagggaggagggaggctcagggccccctccccagtccctagggccagtgggcatgtctctgtcccccacagaactatgtgagctgccacgaccccaacaacaatgcccctttgaggtggccagacgtccagtatcagatcttgggcggccggacagcaaaccagatcattttcggccacaatggcttttatgtcttctacatttcgatcgtggatccgtactacaggtgagtgggcccatctgcccctacgacaggggacgcctggtgcccctgggggcaggtcacccgtttcgggggacatgcaggtcctggctaaacctgaattcccccaacagcccaggccgtccccaggacaagtgatgttttaagttctgggtgacatttgttcccatgtgaactaaatactcatttcagagtcctgcactgagtgctgggggaacagcagtgaccagaggctgtgccgctgccctggcgcacctgagtcgccctctcctactccccatggctagagtgtgctgatggctgtgggccagagctggctcaaactggctcaccaggagtagactctcaaatattcaggaatcttcagcctggccaacctggtgaaaccccgtctctactgaaaatacaaaaattagccggctgtggtggcaggtgcctttaatctcagctactcgggaggctgaggcaggagaatcgcttgaacccgggaggcagaggttgcagtgagctgagattgcgccactcactggcctctagcctgggtaacagagcgagactccatctcaaaaaaaaaaaaaaaaattcaggaatcttacaccaatcaatttcatgtcagtggcttcgaatcagccacagtggaaatatttacactacgggaattggcagacactacccaggaggcctttcccctctgagagccagttgttaaatatttagcactgacaggtgctgaggagattataaagccacatcgaagccatgccatgtggatcagtgtgtccctttggaagggggacaccaggtggaaatcttcctcatatcctcacccctactggaagtcattgtcacttatcacctgtcctctccagtaggatgaaagttcaccccctgaaaaaaaaacacgtggaggtcctgccttctctagaggccccagactaggaggatcagctccggggtggcagcaggtggaaggcactgggtagggtgaggatgtccaccagagagaggagacatgtgtgggactctcccgtgccacaggtgctccctgcatcacgtgacctgcactgtccccctccctgccgtggattctgtgacacccctgaacctttcctgccctgacctagcctccactgtcacccaccacttcctagttgttgatggaccatttagttaatttgccccttccgccctctctagccagagcctgggcattgggggagaatagggatcctggtgacagctgccagagggcatggagaggatggctgactcagaacccataaaagtcggcctggcacaatagcttacgcctgtaatcccaacactttgggaggccaggacaggtggatcacttgaagtcaggagttcgagacaagcctggccaacatggagaagctccgtctctactaaaaattagccaggtgtgatggtgggcgcctgtaatcccagctactcgggaggctgaggcaggagaatcgcttgaacccgggaggcagagattgtagtgggccgagattgcaccactgcactccagcctgggtaatagagccagattccaccgtttcaaaaaacaaacaaaacaaaacaaaacaaaaacccataaaagtcaaagtgggccaggtgcagtggctcacacctgtaatcccagcattttgggaggcagaggcgggcggatcacttgaggtcaggagttcgagaccagcctggccgaggtgaaaccccatctctaccaaaaatacaaaaattagccaggcatggttggcaggtgcctgtaatcccagatacttgggaggctgaggcaggagaattgcttgaattcaggaggcggaggttgcaatgagccgagatcgtgccactgcactccagcctgggtgacaagagagggactccgactcaaaaaaaaaaaaaaaaaggcatagtggatggaaacagaagtgggtatacccggtcactgctgtgggcctggttctccctcctgtgggtctgaacacctttgccagagataaggcgaagtcccccaaaggcaatgcccaacagcctctccccgcctccccccaccgcagctactgtcaactggagaccatctttagcatctacgtgtatggagcattccccgtgcagctggtctctgctggagtcgtcatcctactgatcatctccagcatcctggggtccgtttggctggcctacaagacccccaagctgctacgcacagcacgcggccgcaggatcaagaagtgtgcgacacagctgtgtaggagatgcaagacggtctgccagttcagggcctcagccacagccagggcaggcacagagcccccgggacgccaccgcactcctcacggaggcaggtctgaccactgaggccggtccacagggtcccaaccccttgtcttcaaataaagtataatgtaacatagcagg[135 bp omitted]cctgcctcagcctcccaagtagctgggactacaggcgcccgccaccacgcccagctaatttttttgcatttttagtagagacagggtttcatcgtgttagccaggatggtctcgatctcctgaccttcgtgatccgcccagctcggcctcccaaagtgctgggattgcaggcatgagccaccatgcctggctttttttttttttttttttttttttttttttaagtatcagtgtggtctcattgtgttgcccaggctgagagtgcggtggtgtgatcacagctcactgcagcctcaaactcccaggcttaagtgatcctccctcctcagcctcctgagtagctgggactacaggaaccaccaccacacatggctaattttacttttagtttttgtagagacagggtctcactttgttgcccaagttggtctcgaactcctggactcaagcgatcctcctgcctcagcctctcaaagtactgggattatggatgggccagtgctctagggttagccatctctctgagtgagatggagtctcactctgttgcccaggccggagtgcagtggtgtgatctcagctcactgcaacctctgcctcccagattcaagcaactctcctgcctaagcctcctgagtagctgcgattacagacgcctgccaccatgcctggctaatttttgtatttttggtaaaggcagggtttcaccatgttggccaggctggtctcaaactcctgacctcatgatctgcccacctcggccttccaaagtgctgggattacaggcgtcagccaccgtgcccgccccacccccgaccttttttttttttttttttcggagacagattcttgctcctttgtcctggagtgcagtggtgtgattttggcttactgcaacttctgcctcctgggctcaagtgatcctcccacctcagcctcccaagtagctgggactacaagtccacgccagcatgcctgggtaattttgtttttttactatttttttttgtagagatggggttttgacatattgcccaggctggtctcaaactcctgagctcaagcgatcctcctgcctcagcctcccaaagtgctgggattctcagtgaaccactgcaccagggtcagccatctccttttaagtgaaaatttggtcagtctcatgacttccgattactctttggttaaaaaaatatatatataaaatatacatacataaaaaatacatatataaaatatatatattaaaaatacatataaaaatatgtataaatacatatatatattaaaaatacatatatataaatacatatataaatatatattaaaatacatatataaaaatatatatattaaaaaatacatatatatattctgtgatcattttaaattgccccacatagctacaacaggctggggcagggggatcacttgaggccaggagttcaagatcagcctggacaacatagcaagaccccccatctctacaaaaaaatttttttagacattagctgagtgtggtggtgcatgcctgtagttccagctacttgggaggctgaggtgggaggatcgcttgagcccaggaggtcgaggctgcagtaagccatgatcacggcgctatactccagcctgggcaacgtagcgagaccctgtctcagaaagaaaaaaaaaagctactgcttgggtccttgcagacatccactgtgtgaccctcactccacattaatcttcaagaaaagtgatccaggtccttgccccacttcctcatcagccaggacctccccgacacttgggatacctggttttagtttcagagatacccctaatgaggcttcggggagaaggagttgaaaagcagctgagaaaagtgggcttggggctgggcgcggtggctcacgcctgtcatcccagcactttggtaggctgaggcgggcggatcccctgaggttaggagatcgagaccagcctgaccaacatggtgaaatcccgtctctactaaaaatacaattaaccaggtgtggtggtgcacacctgtaatcccagctactcgggaggctgaggcaggcaggagagtcacttgaactcgggaggcggaggttgcagtgagccgagatcacgccattgcactccagcttgggcaacaagagcgaaactctgcctcaaaaaaacaaaagtgcacttggagtctctcccagcctgtgtccccacgggtcaaacagtgatgaatggggatcactgcagatgccaggagggcacatggcacagtccctgggacagggggaccctgtcttgagggccacagctgcatggccccgagacactacccggagttgtttttgttttttgaaatggagtcttgctctattgcccagggtggagtgcagtgatgtgatctcggctcactacaacctctgcctcccgggctcaagcaattcttgtgccttagtctcctgagtagctgggattacaggcgcctgccaccatacccagataatttttgcattttctttttttttttgagacggagtctcactctgtcgcccaggctggagtgcagtggtgcaatcttggctcactgcaagctccgcctcctgggttcacgccattctcctgcctcagcctcccgagtagctgggactacaggcacccgccaccacacccagctaatttttttgtatttttagtagagctggggtttcatcgtgtttgccaggatggtctcaatctcctgatctcgtgatctgcctgccttggcctcccgaagtactgggattacaggcgtgagaagctgcgcccggccaatttttgtattttcagtagagacagggtttcaccattttggccaagctggtctcgaactcctgacctcaagtgatctgcccgcctcggcctcccaaagtgctgagattacaggtgtttgccactgcacctggcctcctcctgagttttttgaataagggtttccgggagagtagctccagagagcagcaggcacagtgccctacacagagccgggaccatggtctctgctcggcctccaaacacccatcagcctcctggactctaggtgagcctcccagggcctccccaagcagaggccttgaaacccaaactccggagacccaggagatccagcccgcagcctggggaaggggtaggctgaaggttcccatcccagaggggtgtcctcatcccaggaggcgctggatggcactcgacctcctgtttccttatgtgtccctgggggaatggggtcagcctctccagggccaccatgagcgtttcaggggaggagggtacaggtggccactgcctggacccccaggagggctctcgagaccctgatgtgggtaagcagtgacgggaaccagcacccggaggtcgttcttccgaggctgggcccatcccattttggaacgagtagccaggctgtccctgccaccccggaccccgaagtgtggccgggtggggcccctgaccctctcctgggctccaggtgctgtctcctgtctccatcttgggtgcacatgccaggccccctgggtgccgtgtgctccccaccccttcacgcgtgggcactgtctcatccctgccccagcccccaccctcagaccatcaggtgaagcccctgcacccacctgtctgtctgaacaagagcgtggcccttcccgccctgcctgcagtggctgtggcttcctggggacaggaggcagctgggtggggatctggaggatgctcctcaagccctgccctgatggctgtgtgtctccaaggaagttcctgctgctctgggcagccttgctttcccccaccaaacaaaggggtgaaaacccttagaacgcgttgagtctgggggtcagctccctcgtgccccaggaggcccctgcctctgccagaggagtctgatgttccagggctgggactcaaggagtttagggtgtcctgtgattccggggctcccctgctaagaggcctcactgtgaggccgggggcgctgccttgccagtccgcgggatgatggggtgaggggccaggcgtgcatctccagccccctccccatccccaaggcccccacgtggacatggagctgaaaggtcaaatgtgctttaatgcggggtggctcccaggtcctccctgggccccgggggagtggcgctggctgggcctgccggctgcctggccttccttcccggctttcccttcttggccgtcgaggcctttctcttgccagacagaatgggggccggggtgttggtggcagggggccccgggtggggcggctgctcctcgtcgagcgccttgaagttgaagaagtagtcaacgttggacacggtgtccaggatctcaggcacgctgtagtcaaaggacagcagctcctcgggcaggcacagcgagcggatgtcatcggctgagttcccaccactgctgtcaggcagggccggcccagggacctcgcacagggtaccctcaggctcagaggcgcctggcaggcagtcgaagagcttcatggcgtcctccagcagaaccttgtcaggcagtgccaaagctctggccgtcttgggggccttggccttgcctgctcccagcagggccccctccttgacctcggccaccttgagctcgctgaggcccggtgggtacaggggcaccccaggtcgggccccactgccctgcagctccttgacggggaaggccaggggttcgggcccagggaagtggccgaggtgaccctggaggtggctgtaggcgtctgggggcagtgtgggctctgcaggcagcgtgatgagtacagggggcggcttgttctccttggggggtgggggtggcagcggggccgggccttcctctaggggcggtaggggcagctccacgaaggcggcgggccctgcgtcccccacaaaacccagagcctctggcccggggccctcaggcgggaagtagggcaagagaaactggggccccccgggtgcctgctggtagtgggggtatggaggcagccccggggccttgaggtagggctgaggctccaggaggtagctgcctggggcggaggggacccccgctggccccccgctgcttgctgccagcttatacagggctgactggcccaggtcgggggtggtccactcgatccgatagatgcgggggtcgaagaagcacccgcatggggccatctggaaacctgtgggcggcaggcgggtgccctgagagcagctgctgcctgaggggcccagcccaagcctgggggcctgtttgggagatgccacaagaaccttgccattggggggcccctttgggggacgacatagatattgctttggggccctggctgggtgatggatgacacagagcttgtctttggggctcatctgggggacctgtgtgaagcatggggagcagaggccatgccttcaggctcccacttagggacggggcaggggcaagatgggcctgcacactcaaacccactcccagcctcgtcaagggctcaggggaggccggtacctgctggtggggctggaaacacctctttctctgggtctgggggatgatacaggttcaaggagcctgtggacaaaggtgcccaggtgggtagggcccttaggcgggtgggcccctgaaccctctccagcaggtgctcccacccacccgatcgtacccatagcgggaggaggctcggcacaggtgggagcaggctggttgcccagcacctcagccccctccagactctgcgggctgaaaccttcctggggagctgcaggggcacagaacggtttggggtgctgcatggggcagcggggggcccggtccagacaggccaggagggcggcagtgggagtgcaagtggcccaaccggagaacaggctgagaacctggtggggttctgtttgcctggttactcggggcagcgggttccagcctgcagcgcgcccactggttggggttctgggtgttgggggcaagcaggggcagacgttggcagacatggtcatcaccatgggagggaggattctgggccaggcctttgcctcttccagcaacacccccctaacagctttgaggccgcctcctccaggcaggctgccctgatccacacccacacaggctgaggccccccgggtcctcaacccgctaccttcttgggggtcaaggcctctctgggcaccagcagcacccagcttggggcagggcccatggaggcagctaagaggtttggggaaggtgggggccgaggaggggctgcttcagggtcacagaaaggcctggattttaaaagaataaaatttattgtactctcctcgccccagggtgcccctgggaaagcctgaggctacttgtacgcgttggccttgtgcttcggcaagaaggcgaagctggggggcactggcccaaggagcatctcgctgtgggagagcaggtggaaagcgaggtcaggcccaggacctgcaaagtaccctccgtgaccccgggcccccgactgcagctccccaactccagcccacccaggcacctgatgcggatccagtcggctgccttctggctggccatcagcgtctccaggtagtcgcggcccaggtagtagggcggccgctcgttgatcctctgtgggagccgctccagcagccccacgggcacgtacctgcggcgggtgggcgggcaggacaggcttgagtcagctctaaccagccgcggcccacgcgccgcccaccccagccagccccggtgcccaccggcacaggaaggacagccactcgagcagaaagcgccgggtcttctccacgccctgcgtgtccgagccccagtgctccaggccgtagttggtgaagtcccgcaggatgtccaggcgctcggacgacgagatgtcccagtgccgctgctccttgatctccgtgaagagccacggcttgagcagggcgccactgtgggacgggtgacgatcagtgggcccagccaccagcctgcctgggatcgtgtggcctctgcttccatggcctggcctgagccggagcccagaccacaaaacctacaagcctagtaagcctcccagctgcatgcacacaaccttcaaagcacaggactttcttttgttttttctgagacggagtctggctctgtcgcccaggctggggtgcagtggtaagatctcggctcactgttcaacctccgtctcccaggttcaggcaattgtcctgcctcagcctccctagtagttgggattacaggcgtgtaccactacacctggctaatttttgtatttttaatagagatgtttcaccat[137 bp omitted]gcagcagcaatttccagtcccctctgccgcaacgcagctgcaactcctgacatcgctctctgctcctcccatcttgggaccaacagcccaccacagaacaggggtgggtgacggcgtgttgggttcagggcactgctgctgtgcatgaagctggatctctaacatccctgggcacttaccgggcaatcatgatcccggtgacaccagtctgcatggcgcggttggcatcctcaaatgacaagatgtccccatttcctgaggagacagaggctggggtctcagggagacatgggcaggtgggaccctggagttctgctcaccagcccttcaggagttttggctgacccagtggctcccatcagggtggtacgagggggtcccaagtgggaaggcgaacagcccagaggtgtgagtgaccaagggtggtaggggagagggaggtggcttcccggaacacccaccgaacaggggcatggggctggcggcctgcacgcactcctcgatgtactgccagtcggctagcttggtgtagcgctgctcccgagagcggccgtggagctgggggagaagccgccacgcagggtaggaggcagagagtgagacgcagagaggaagagaccaagagagccaggctgagagagacagagagagacacaggcggagacagagggaggtgtggaggtgaagagggagggatgggaggagaggagccattaggaagggacgcggggtcgaccgcgaggccccaatgcccgaggcgtcccaagacccaccgtgacgagtgccacgccccagtcccgcagctcgggcagcaggcggtgcgccaggttcacacgctcctggacgcctgtgcggatcttcacagtcagcggcacatccagcacctacaggacggtggtgggaggtggtgggagatggtgggaggtggtgggagacggtgggaggtggtgggagacagggcccgggggagttgtttgggagccagtgcgaggatgtggctggccgtacctggttcatgccacggacgatctgctggaacttggtggagcgattcatgagggcacagcccccaccctggaagagacaggcgggtggagggagggcaggacgtgggctgacccaagacccctcacccctgctgcccggaggcccccaccaggagacgccgacctgcaggaaaggcagggactccagggccacacttgagcccaaacccctgaccctccaccgagacatcgccggctgggtcagtgcctccctgcccagatggggaaaccgaggcacacgtccagggccgctaccttcttgtacacgaggtcgatggggcagccgacgttgatgtccacaaagtccacctccacggtgcggctcagcagctcggcacacttggtcatggtgtcggggaaggcgccctccagctgtaggtgggtagtggcagaacaggagggtgaggggagagtccgaactgtccccacttggccgttccctccccactggggggccctgagccagtggcctcctctctcggggcctccccggaaggagccaaggtctgtctgcgaggcaccggtccccggccacggccatcagcccccagaggtggatcagggcatcacccccactccacagctgaggccagggggtcagggaggcaaccagggcagacctggaacctggctctgagacaggacggccgagggcccctccactctccctccctcggggtgggcactgacctggacgccaaagatgtcctcacactggtggcgtttgagtagggcccactcggacatctggccctgcagcaggttggtgcagacggccatctctccacatgtcacatccgccccgaagcgcttgcagatccgtcggaagggcaggttcccacactgcggggggagcaggacagacacacatgctcttgcacgcgcacacacacacacacacagcagaaccctgaatatgcgccccagccccacaatccagtaggtggggacagacactaagccctgttggaatgaccacactgccaccctgccacccgaccagccacctgacccaggtcctaccgtggtgaggggggccaggtaaagtttgccacggatgtccagctggagggaaaaaaatacacacaagtggagcttggcctccaccccagctgctgaggccctggagcctcccttctacccacagtctaggacacacttggcccaaatggtctggctcctttgctgggcctctgcatgtgccaatcaatcccttcatcaggaatgttcctttcctcatcgtctcctccactggagagcttctacttaaccatccaaacccagtcccaatgccccctcttccaggaagcctcccacatttgtcccccgctgcccgaccctgaccctctgagacttagagtgtgtccagctctttttttttttttttttttgagatagagtcttgctctgttgcccaggctggagtgcggtggcacaatcttggctcactgcaacatccgcctcctgggttcaagtgattctcctgcctcagcctcctgagtggctggaattacaggtgcccgccaccaggcccggctaatttttgtatttttagtagagatagggtttcaccatg[139 bp omitted]aggacagagcacagagagggagactcagccaggagctccctcaaggcacacagcctctgactcccaggcagctagaacaggaacgtggacacagctggtatttaatagacgcacaccagatggacagatctgctactgacgttgtcctcaacacgtacccgcttcttctcacagggccgcagcctgaccacgtcctcatccgtcaggggcccgcaggtccgcacggggctgctgggaggggtgctagtgcccggccctgcggggacctgctgggcaccacagttttcctgcctgggagcgccctcggctgccgtgccctcggggacagcggcagcgggtgtggggccctggctgaaccggcgcagggcctgctcagctcgctcgaagcggacctcgcgcttccgcagctgctgctgcagggctttgtccaggccgttgcggatggacgggggctgggtcccgcgggccgccaactcctcctgcaccaggttctgtccctcgggcctcaggtgggccccagcgaagcggcaggtcacgccgtaggggcaccggccgaaggtctcgaagagcacgcagcgggggcccaggtcggccggcttggtctccaggtagcgccccacgtcgtgcagaaagcggcagcgatcaccgaagaaacacttagcagccgactcctgcgaggaaacagggaagcagtgagggaggacagggagaccccggggcagcccagcagccagggttcaaactctagatcacccctcctggctcttgtgtccctgagcaagtcaggcacctcaccgtgcctctgcatctccatttatacaatgagaacaatgacaagccctacaatgtatcccgaggagaatgaagacggaatggcatcagagcaagctcactgctcgttgctgaaggcccaggagctttctaacaattacccgctgccaggaaacacaccctgctcctgcctgccccggcaggaatgctcacgtggccgcacttgcctggattagggagggacacagcctgttcttgtcgtagttcgtgggcttcacatggggccggcccttgttttgtccccgggccctcttctgagtctgtagctgctccccgggctctgctgcctcctccgtctgcccgtccgccgtctgtccatcctccagtcggatccgcttagcctcaggctcagccagctcattgccagcagggtctcctacctcggtttcccggcaagtcttctcctgccctttggcttccaggaattggtgaaactgctccttggtggtgaggtatctgccgacagaaagggaaaggaaaaccctccgaacatagtcaataaacactggggaaaggaggctagaaacacttgcacgtccttaaatccttctgctgatggggagctcactacttaagaaccagccagctcccagcctgggagcccctcacggcctcaaaaaagacctattttgtccctgggtcctcactgtccaaagtgttgcgcgaaactattatcaggttcagtcaagaacgtccctgcgcacgttaggctgcgaaaaactacaattcccagcatgccttgaagcggagtctaagccaccacatttcccagcacgcctttcggcccttcaaacaccgcaggccccagcacgccccgcggcactcgcttcaaccccaagacccgccagtaacggccgctggcagagcacatgcgccgtacgtccatatgcagggactacaatccccagtatgcagcgcgggcctggcctcaaatcccacctgccctagcatgcacgtggtgtccttcgcgcatgtgacaggccccaacgtgcacgatctcaggtacctccgctgaccaccctgcaggcggaagaacggcccggaatgaagagccggtggcttctcgccctcagccgctgcctaatctcccggcatgcacagctcggaccgcgctatgggtgccggaaaaggcccttcagcttccctcctgccccggcgactcactgacgcttaatgggcgccactcctcgttccaaagctccggctcccgagtcgccaccaccaccattctctagaggagcctccgccgttccctccgccatcggcgcccctcacatccgctctggagtgtggcgggaagaccttccgggtcacgcgtgtcttccctgattgtgctggggaagtgcgcatgctcatgtcgttccaatgacgccattgctcgctcgtgacgccacgggggcggtgcctgcacatgggtggagcctcaggtcctatataaactagagcctggccaattgcgaactggactgcaatcagcttctggactgaggaaatttaactgttagggtgttttggaggtttttgtctttgttgttctgttgaaacggtttcgttctgtcgcccaggctggagtgcagcggtacgatcacgactcaccgcagcctcgtcctgggctcaagctatcctcccacctcagcctcccaagtagctgcgtctacagacatgcaccaataggcctggataatttttaaattttttgtagagacgaggtcttgccaggttgcccaggctgatcttgaactcttgggctcaagcgattctcccactttggcctcccaagcattgggattacaggcgtgagccat[136 bp omitted]caacatggtgaaaccccgtctccactaaaaatataaaaaattagctgggcgttgtggcacatacctgtaatcccagctacttgggaggctgaggcaggagaatcgcttgaacccgggaggtggaggttgcagtgagctgagatcacgccattgcactccagcctga[142 bp omitted]tctctactaaaaatacaaaaattagccaggcatggtgatgggcgcctgtaatcccagctactcaggaggctgacgcaggagaatcgcttgaacctgggaggcggaggttacggtgagccgagatcggccgtttcactccagcctgggcgacagagcaagactccatctcaaaaaaaaaaaaaaaaagtaaattacactacttttatgcaggacattagtttcaacaaataattagttgagcatctgtatgccagatgctgtgctagatgctgggggcgtggtagtaaacaaaacggagaaatcattacctttaagagctaacttgggagtcggaaacacagacgaaaaacataatactcctcggaattttggagattggttccaagaccgcatataccaaaatccgcgtatactcgtcccccagttgcccaacagaatccctgtataggaaaaatccgccctttgtatccgcaggtttcccatcctgcctccgcatttggtaggggttaaagaacccgcggatacggatggccaactgtattttatttttcgaaggccacttataagtggatggatgcaattcaaacccgcgttgttcgcgggtcaactgtacataagtaaattaaaccgtaagtgagtaggtaataaagcagtaaggtggattgggaatgccacccttggctgttggaatttttttcttttttttttttttaagaggaagtctcgctctgtcacccaggctgcagtgcagtggcgcgatctcggctcactgcaacctccacctttccggttcaagcgattctcctttctctgcctcccaggtagctgggattacagacgcccactactatgcctggctaaattttgtatttttagtacagatggggtttcatcatgttggccaggctggtcttaaactcctggcctcaagtgatccacctgccttgagtgtgagtcaccgcacccagccacattttaattgtttttgagagacagagtttatttatttatttaaatttatttatttacttatttatttttaaaaatagacttatttatttattttttgagacagaatcttgctctgttgcccaggctggagtacagtggcgcaattatagctcactgctgcagttgcagttgttaacaggctggcaagggaaggcttcctggggaaggtcatgtttgagagtatttggaagagctgtgggagagagttgtagggatatcagagggaaaagtgtcccaggtggaggcaacagccagtgcaaaggccctgaggcaggaggaaacgtcctggcatgttggaggaacattgaggaggcccatgtggttggagcagagagtccaaggaggacagaaggaggaggccaggggagggaggtgaaaaggtgcaggttttgcaggacccagtgcactttgagaaggacttggtcttcttctacgtgagtgaaatgagagccacggaaggctgtgcgccaaggaaagctggatctactcagcatttcccagcgtccccaccaagccctgctgtgccccctaaaactccctattcctggagaagctttggtgtgcacaggaaattcagggttctggactcagccaagtttgaatccccgcccctccacttaccagctggaaacattgggcatctcatttagccccctcataccccagt[223 bp omitted]gaggcaggagaatcgcttgaacatgggaggtggag[132 bp omitted]ccgaggccacaacaggcttggaacctgcttttacaggacctgggagaaagttgaggggagagcgggcagtttgtcttccatctctggccttggctgccctctgtaggacaacctgggaataaaacggtggaacccgggaatctaaaagtgcaaaaggccgggcaccttggcttaatgctgtaatcctagccctttggagacaggaggatcgcttgaggccagcagttccagaccagcagccttggccacttagagaggagaccccttctctgcaaaaaaaatggaaaaactagctgggcaaggtggcatgcacctgtggatctagctacttgggaggctgaggcaggattgcttgagcctggaaggtcgatgctgcagtgagctacgattgtgccactgcactccagcctgggcaacaaagtgagaccctgtctctaaaaataaataaataaatggctaggtgtggtggcttatgtaatcccagtactttgggaaaccgaagcggttgagtcacttgaggtcaggagttcaagaccagcctgggcaacatgttgaaaccctgtctctactaacaatacacaaaaattagccgggtgtggtggcaggtgcttgtaatcccagctactggagaggctgaggcatgagaatcacttgaacccgggaggcggaggttgcagtgagctgagatcgtgccactccactccagcttggacaacagagtgagctcccgtctcaaaaaaatatatatatacacataataaaaattaaaaataaatcaataaaaccagaagaaaccaaagcagtcagggtgagacttttttttttttttttgagattaagtctcgctcttgttgcccaggctagagtgcaatggcacgatctcagctcactgcgacctccgcctcctgggttcaagccattctcctgcctccgcctcctgagtagctgggattacaggcacccgccaccatgcctggctaattttgtatttttagtagagatggggtttcaccatattggccaggctggtctcgaactcctgacctcaggcaatccacccatcttggcctcccaaagtgctgggattacaggtgtgagtcaccgcgcctggccggggtgagacttcttgtccagctgggcttgtccaccatccagggatgggtactcctccctccaggggtgcctttccgttcccctctgaggttctcccacttttctttcttatcatgtcactactaccccagacagctttgaggagacaattgtcagatggcagaaactgaggcccacaaaaggcaacctgaggaatgtggcctctctctgggcctcagccttgaagaagagatctcccagggctgcctggctgtgccgtgtgataactccacctcctcagtgtaaggcaatcccagaaggcttcctgtaggaggagggctgtggattggccaatttttaagtatgatattaatatgaataaaataacatcaactgtttactaatatatataatttattattattgttattattattattattattattattatattgttgttattatttttgagacagagtctcactctgttgcccaggctggtgtgcagtggcccgatctcagctcactgcaacctccgcctgccgggttcaagcaattctgcctcagcctcccgagtagctgagactgcaggcgcatgccaccatgcttggctaattttttgtatttttagtagagacagggtttcaccacgctggacaggcttgtctggaactcctgacctcgtgacccacctgcttcagcctcccaaagtgctgggattacaggtgtgagccaccgcgcctggccattattatattattgtagtggtataatattgtttaccagtagctgaacaattactgaacactttctgggtaccaggccccattctaagccgtcttcttcttcttcttcttcttcttcttcttcttcttcttcttcttcttcttcttcttcttcttcttcttctcctccttctcctccttctcctccttctcctccttctcctccttctcctccttctcctccttctcctccttctcctccttctcctcctcctcctcctcctcctcctcctcctcctcctcctcctcctcctcctcctcctcctcctcctcctcctttcttcttcttcttcttcttcttcttctttttttttcagagacagggcccaggctggagtgggatcatagcttactgcagcctcgaactcccagggttaagtgatcttcctgtcttagggttaaatgatcttcctgtcttagcctcccaagtagctcagactacaggctcatgccactttgcctggctaaattttctatttttcctatagatgggttcttgctgtgttgcccggggtggtcttgaacttctggcctcaagcaatcaagcagaaagagttggaggccggagccaggcgcggtggctcatgcctgtaatcccagcactttgggaggtcgaggtgagcggatcatgcggtcaggagttcgagaccagcctggccaacatggcaaaaccctgtctctactaaaaatagaaaaattagccgggcatggtggtacgcacctgtagtcccagctactcaagaggctgagagaggagaatcccttgaacctgggaggtgcaggttgcaatgagccgagattatgccattgcactccagcctgggcaacagagcaagactccctctcaaaaaaaaaaaaaaaaaaagttggaggctgggtgtggtggctcacgcctgtaataccagcactttgggaggccaaggcaggcagatcacaaggtcaggagttcgagaccagcctggccaacatagtgaaacgctgtctctactaaaaatacaaaaattagccgggcatgttggcgtgcacctgtagtcctagatacttgggcagctgaggtaggagaatcactagaacctgggaggcagaggttgtggtgagccaagatcatgccactgcactccagcctgggcaacagagcaagactccgtctcaaacacacacacacacacacacacacacgcaagactccgtctcaaacacacacacacacacacacacacacacacgacaaaaattagccgagcgtggtggcacacccctgtaatcccagctatttgggaggctgaggcatgagaatcacttgaacctgggaggtggaggctgcagtgagctgagatcgggccaccgcactccagcctgggtgacagagctagactatgtattgaaaaaaaaaaaaatacctccctgactgtcccctgctcagggtgggttcagtacccactttgggctctgcagctttctttctttttctttttttttttttttttttttagacagagtctcactctgttgcctaggctggagtgcggtggtgcaatctcagctcgctgcagcctctgccaaccaggttcaagtgattctcctgcctcagcttccctagtagctgggattacaggtgcataccaccacgcccagctaatttttgtatttttagtagagatggggtttcaccatgttggccgggctggtctccaattcctggcctcacatgatccgcccacctcggcctctcaaagtgctgggattacaggcatgagccaccgcgcgtggcctgggctctgcagctttctgaatggccccccatcagggccccggcaggactggggatgcctggccacatgcccgtctttcccactggacgatgagcccagagagggtgggaaacgggcttagcttagtccctctgtgtccctagcgcccagcacagggtctggtacacaggaggtgctccgtggacacttgccgagtgaatgcgtcttaccatgactggggaaactgaggcacaggggtgcagagcctgccctagagaatcccaccttcactgaggctgagggagggggctgagggcttcccaagggccctggctcaagctattggtgtcactgtacagtgtgtggggacactgaggaatatgccccccgatcctggaccaggcctggactgtccttgactaacctggaggaggcaggatggaggttggtggtcctggggcccctgagcaggtggggagactgaggcacccaggtaggggtggagcagggcctggggactcaactggtggttctttgtttagtcgccagctggttgttctttgtctctctttctctctctctctcccccttatccttccttccttccctccctccctcctttcttttccttccttccttccttccttccttccttctttctttcttattattattactatttttcgagacggagtctcgctccatcgcccaggctggagtgcagtgccgtgatctcggctcactacaacctcctcctcccaggtttaagcgattctcctgcctcagccttctaagtagctgggctgacaggtgcccgccaccacgcccaggtaattttttgtagttttagtagagatgaagtttcaccatgttggccaggctggtctcaaactcctgacctcaagtgatccacccacttcggcctcctaaagtgctaggattacaagcatgagccgccgtgcccggccactgtttctctctttttttttagagacaggatcttgttcttccacccaggctggagtgcagtggcatgatctcggctcaatgcagcctcaacctcctgggctcaagtaatcctcccgcctcagcctcccaagtcgctgggaccgcaggcgcccaccatcatgcctggctaatttctgtattttttgtggagatagggtctcgccatgctgtcctggctggtctcaaactcctgggttcaagcaatcctcccacctcagcctcccaaactgctgggattacaggcatgagccactgtgctcaacctattcttcctgtttctaactcagaaaacatttctagttctttctgtatttccttctctctgtgaccctctcgaatctctcgaatttttctctgcatctctccctctctctctctctagttccccctccctccatgctcctcagtctctcccccactctgtgtccccctcttgccctctccgcagccctctcgcccaggccggatgggggtggcagcagcagggcaggtgcggccccgggctcagtgcccgatgctgccgcggccgccccggatttgtggctgcgactcctttatctgtggctgcagctgctccttatctcctggcttcaggacaggagcctgggattagggcagcccgggccaaggacgcgagatggcagggcaggcgggtgggcgggaggtggcagagagcgggggagccgggtgcgagcgcatgtccctgagtgtgtgtgcatgtgggagccagactgccgtggatgcatgacttgggggaggcctgtgtgtgtgccattgtgtgtctgcgtgattgtgtgtctgtctagtgtgttatgaaggtgcatgagggattgtgtatataccttggtggctgtggcctatgtatgactctgtatgtgtgtgtctgtgtgtttgtgtgtgggtatgcatgaatgttggtgccactgtgagttcctgagaagagccactcagccactgctatgtcccacacgagaccgcacaaccccagcccagctccctgcttgcacaaccttgctcctgagactctattcccctgccctggcctccttggtgggcctgatggttttcccaccttgctgacctaaggcccccagggacgggccccttgacctgcgacctgtggctgtaaatggtcctgtggggacagctgctggccctgttttcaccatcctcacctggaacgggccggccccttcctgccacccacaggccttgtgggtcccatccccgcctggcgggctcctaacccagctcccggggaccttgctccgggccagcctgacccccgcccgggagtgtgtctccagctctgtgtcctctgcctgagctgaggcctctgtgtgtgctcggcatgggttgggcctggggtgagagtgaccgttgaatcagtagccccaaaacatcgtttctggggagccctcagctgtcccagtgtcctgggtaagtccctttccctctccacgggagaatgacagcacccacctctggtaacatattacatgcccagtgctgggcacagaacaaacgtgggagccatttggcagatggggaaacagaccccataagctcagtcaccaacacactggaggctggggtggtgcccagtgtgctgggatggccagtgctccagccaggggacacagtgggcatccagccacctccacccccacagggctggtccccgggggtcctgaggtgcagcccaagcccccagaacctggcccaactcctggcgctaagatggaaacttctccagcagccaagtctgagtcttggccagcggcccccggcctcccagaacctctgccctggagtctccacccaagaacagatcactccctttgggagcagtggcctcctggggagggcagggggccagcctccgggaggacaggggtggagcgtggtacagtcatccagccccactttgcagctttttccttacttgtgaccttaggttagtggcttgacctctctgatccctgagtttcacaaccaccacgtgggcagagagcaggtggaggtggggtgagtgttgcagggagtggaggcagtgaacgagcagaactaatttccaggcaaacaccagaaagggcaggcaggctttgggatatggttttcagccaccgctgcacggttccacccctgcctcggccttgaccctgatgccagcaggcttgaatcagtcaaagaggtcagctgcctgggccagacacggtggctcatgcctgtaatccgagcactttgggaggctgaggtgggaggattgcttcagcccaggatttggagaccagcctgggcaacacagcaagaccccatctctctaaaaaattaagaaattaactgggtgcggtggtgcacatctgtagtcccagctacacggaggctgaggtaggaggatcgcttcagcccaggaggtcaaggctgcagtgagctatgatggcgccactgcacgtcggcctgggtgacaaagtgagaccctgtatccagaaagaaagaaagaaaacaaaaggtcaggtgccttcctgctcctctctgagcctcagtttccccatatctgtgctctgggaagaccacagatcctacacacaggctgcacttgaagaaagagaggctcagtacttggcgacatccggcccgccctgcggcagcccaagtctgggacaaaaaagatttaaaaataaagcattgtaaatacccttgtttcctgcaaatagagccagcctctgagttccctggcctcccgggcagccaagcccagacagtttcttggaaaggggtggaattcagagggctgttttttgttttttttttgggggggggggatcagggtctcgctctgtcacccatgctggagtgcagtggtatgatcatagctcactgcagccttgacctcctgggttggggtccttctgccccagcctcccaaatagctggaaatataggcgtgcaccaccacgcccagctaatttgaaaaaagttttattttgtaaagatgggggtctccggatgttgcccaggttggtctcgaactcctggcctccattgatcctcctgcctcagcctcctaaagccctgggatttcaggcatgagccactgcacctagctcacagaggggtgttaatggagagtcctggtccctgggttcctttctgggatagggggtggagggatcctggaggggcccgtgtgtccctgtgcacctcagttcccggctttggtgtgggtcagcgagtgtgacagggtgtctgtcaccgcctgtcacagggggtgagatagcatgtgggttggtgacagagagagtgtgcgggtgatttgggagggtgtcaggatggaaggaactgtgttcctggtgtgaccacatggggctgagcaaggcagggtctccgtgtcccccggtgcgacggggtctccaaccacgtgtgtggttgtttcagcgtgtgtgtccctgagtggaatggctgtagctgggcgtaggtcctcgcgtccccacctcctgcgccccgccccgccccctaccttggacacgcccctagcgtctccccccaatcccagaggaagaaccaactctttcaagtcgctgttgccggggcaaccgttttacaagcgtccacatggtgggcacatgtgtgtgtgtcctgcgccccatgtgtctgctcggcccccgcccccatggcccccagccgcggcggggagggggcacaggcggtgtggggtgagcgggaggcagtggaggggcagctggtgacagcttaatgatggagggctggggtgggggtgggctcctggccctgctgtgtgtgtgcaggggtggctgtgccttccagacggggcccggggtgtatgtgtgtgtctgtgtgtgtgtgtgggtgtgtgtgtgtgtactaaccagtgccaggcagcgtgggggtgtgtaaggatctgctgagagtgtgtgtgtgtgtgtgtgtgtgtgtgtgtgtcgggctgagtgaaccccgggtctgtgggcatgagtgcattcagaagggcgtggggtaaggaaggacccccgcaggagagtgtacgcgtgaccttgtgagatactcgtggaggggttgtgtcagcgtgtgtctgcgtgtgaggacccgggggtggggcggggtgtgacagtgcaggagtgtctgtgctcactagggcgtctaggtttgtgtgagaaggaaagataggccgggcgcggtggctcacgcctctaatcccagcacttcgggaggccgaagcgggcggatcacgaggttaagagatcgagaccatcctgaccaacatggtgaaaccccttctctactaaactgggcgtggtggcgcgcgcctgtagtcccagctacttgggaagctgaggcaggagaatcacatgaacccaggaggcgaaggttgcagtgagccgagattatgccattgcactccagcctgggcaacagagcaagactccgtctcaaaaaaaaaaaaaaaaaaaagagagatggcagggggggtgaccccaccgggaataaaggtttgagggtgtgtgtttgaggttagggtatgtgtgtcactgggagtgggtttctgggagtgaacatttgggaacactagtaatggcagacattgggacatcacccccaacttgccaggcttactcacttacttattcacatttactcattacttatacaagcttgttcacactcattcagtccttactagaacacagtgaagatctactagtaataccctgttacaagtggggaaactgaggcacgggggggaaggcccaaggccacacagaacacagatccctgttaacttccatcctagatctgggaacaggctgccacttctctgacataggtccgttctctcgtccccccacccacaactcacattccagcacgcaccccgcgcacgtgcacagcaccgcgtgcatcagcccgcgtgcagcaggaggcgaggctgcgtgagtgtccccatcaccgcgcgcactgcgcggccccgcaagttttacaggcgctttgtggggacgtgcatatgttggggttagggatcttctaggaaggcctaatctgcatgcgaacccccaggctgctggaatcagaaacatgcaggcagccagggccggagtgaggaggaggccccaagaacctcagcggcgggagcgagaaaccagagcacgggggctccaagaacgcaggcggcgcggggaggagtctgcagggcgggagtttttcggtcaccccgcggggcgggggcggggccgcagcagtcccagcccagctcagccatcccagtcccgtccccgagttagcccggcgccgccagggagcgctgtgggagcgcggagccgtcggggaggagcccgggtgggtttgggctcccctgcccgtgagccttggtgccaggagggggcgccggcgggagctaggagcgagaaatcccctgcagggctctgaggccgcactgggggacttactgcttgatggggggcgctgaggacagcgggtgtcgtcatccgtccgaggggaagactttgcgtctcagttccctggaagagctttcttgggagggggcttcttcagcttctggggaaggagaacctgggacgagattggagggggacaccccaatcctcagtggggtggggggagctgtatgcgggggccacagctgttggggtgtgggccatgggtcttagttcgccagaaggggtcgggggagcgtcttggagctccggatttaggcaagaggagccgtcaggggtccccggagtgaggatgggaaacagctagtttgaggggggcgccgctctgggggcttcccttgaggggcttctttagtgaagggacttcttggcgccttgttctctggaaggggacctgggacaggtttgggaggtctggcagaaaggtcagatcctcgatagaatgtggggggcgccaagggccacaggcactggcgtcgggacagctgcggctcttagacaccttcggagggggtgtcttggggtcccggctctcccgaaggggagccgtcggagtccccggggccgggggagaaagccgtctaaagggggctctgtggttggttcccgcgcctctgccacctgcgctcctccggtcccctccggcgggggcggggagggcggggagggccggggaaacccgagccaccgcccccagccccgcccccggccccgcccccggccccgcgccggccgagccgtccgcggcgggacgggcggaggcggcgggagagcgcgccctgaagccgctccgagtgcccaggtccctctcgccgccgccccggagccccgtgctgcgcgccgaggccgcctgcgccgtccgtgcgcccccgcgccccgcgccctctgagccgccggccgtccagggcacccacccccagccccagcccccgccggcccgggatggccgcagcccgcggctaagcgagcccggggggccccatgggccggcccgcgccgcaccccgcccgcggccgccccctccggcccgggccccccccgggcaccgcgggcccaggcggcccggatggcggtcgcggcggctggggcaggggctggggccgcgcggccgccactgacgggtagtccggcgcccacagcaggtaagcaaggggcaggcggggcaggtgggggggcagcagggtacgacggggacgacctgccccatggacggggcatggagggtgctgaggactccgagtagaccaggggattccctcctgcagcagaaccagcgggtgtatgagggtggggtcagagggacgacaggtcagcgcgtggggaggggcgggggcgtgaagccagatcctaagcggctctccaagcccgaatccagccgcggtgtccctgtccgacggggcgggcgcactcctgtctcctaaaacctccaagtgtgcatctgaggaacgcacggtgccctccccagaatccccttagcctctaggagggcgagacccagacagccctttagccatgtggtctccaaggggccgttggggggcttccggatcctgcagagcccgggcggggggctgccgtcgcggtccagctgcgcacagaagtaaacatctgtcagtggcgcgttccctgctcgccgccgccgccgccggggacacggtgtcctccggtgagggccgggccctctcggctcctggagcagcccgttcagccaccagagggcgtgaaaccctttggtgttgggggtgggggtcccttaagggcaaagcctggatgtgaagtggcgggaggctgtgcctgcctttcctgctttttataaaaggtgtctcctgcacggggatagccccgaattgtcccaggaggtggtttgtggattaggagttattaggcccaagggggctgcagacagattagtggggaggggggtgtgctggagagagaaatggctctcccagggtgaatgccaccactgtcccctccccagaacgcatccgacctgcccacaggcctgtgattacctgcagggctcgtcattggtccagatttggggagtggggccaggggcttaaagcaggggggtgcaggaggccggacccctgactttcctccctcttgcctgtctcccctgccctttccctgttctctacatccttgtccctgttccatggccctctttgtctgtctctgagtgccccgggctgaggaagcctgggtggggtgtgaccagcctcagaggatgtcagtgaggggcaggatcccacccacactgccagcttctcccacccccagcttcttgccttggggccctttggacacccctccctcctcccttcatcctaagactcccgaggttcatagctccggcaccgactccacccccagggagctacagaaagcttcttccaggggtgcagggaagaaaataaaacattcccctcttcagctgggtactgcatctgaaactccaccatcagcactggcccctcggcgtttcaggtcccagttttcagggagcgaacagaggagacagctttcaagagctgggcagaagggactcaaaaagtttgcagccgggcacaacacaatcaaaagattgtttcgacaaatgtgtgtcgatggcaaccgcgtggttgactggtgtcagggttgttgggtgctgtccttcaagggaggcagatttagacccagggacacagggctggggaagctcagagtggggatggagggctctacctcagggtaggaatgtcagagaagacttcctggaggaagggcctcagaggtggggctgtgaaggatgagtaggagttttctaagtgggaaaggaaaaggcattccaggtggctgtgcatgcaaagatctggaggcatggaatagtcaaggcaccttggtgagtgtgggagagactgttctagaaggttggcagaggaagaactgggctggggcactcaaggttgcatccctggaggtaggggctgaatacgcagatcagagaggtgcaagttgttaatgtatctggagtcactgggctggactatctttgctggggggctgtgggcttcctccgctgatgcatctccctggtcctccaagttgaggcagaggctctggggcctcaaggtggaggtggtggccgggggttggggtcgggagatggacaggaggctcccaaaccagccttgcacttgcagggctgataatggccttgaaggaagcctgaagaaagagtggatatgaatggggcatgcctgcaggaagggtgtctcggagatgatgatgttggaatggaggggtctccctgtcaaatccaaatgaaatcaggcttcaggtgagccctggaagaaatcagacagcaggcccagcttacagcatgtggccctcacttcccaagtggggaaactaaggcccagagagagggcactgttcgtgcttaaatagcgcagtgtgtcaggaaccaaggtacaatttgaatttggggagatggaaaagatgatggccaggtgcagtggctcatgcctgtaatcccaacactttgggaggccaaggcaggtggatcctttgagcccaggagttccagactagcctgggaaacatagcaagaccccctctctaccaaaaatgcaaaaattagccaggtgtggtggcatccccctctggtcccagctactcaggaggctggagtgggagaacttcttgagcccaggaggtcgaggccgctgtgagctgagatcgcaccactgcactccagcctgggtgacagagtgagaccccgtctcaaaagaagaaagacaagatgattgagctgacctgtttcccgggaaactgaagagtggttcccagtctcacccagtgttagggtttaaccttcatctggggtctgtgcctcagtttctctttccatcagatggccagcatcttgtggtgtcctggccgctcccggaggacccatgtcgctcaagccacccgctgggacctgtgccagctgcttagccatgccaggcctcattaggctgatcctgtcatcccaccccggggacccccctcctgccagctccagatgcctccgaggccagccctggggcagcctggccagccccaagagactggtgtggtcaaggtggcaactttatagcccaaccacagagggccggggccagaaatggtgggtctaagaagctggcacacacacgctccctagcctccctccccagacacagctgggtggcgggtacaggaagagagagctccaggtgccggtgggggactgcggggcactgaccctgcaggccacagggccctcgttacttcccgcctcatctccctgcattgtcccctggctcctggcactccagccacgctggtcatctcgaacaggcacggtcctgcctccgagcctttatacgtgcagctccctccgcctggaacactctttccagatcttcaatggtggcttttttttttttttttttgagacagtctcgctctgtcacccaggttggagtgcagtggtgcgatctcggctcactgcaagctccgcctcccgggttcacaccattctcctgcctcagcctcccgagtagctgggactacaggcgcccaccaccacgcccggctaattttttgtatttttagtaaggacggg[135 bp omitted]gtcagctcaaatgctttctcctctgagaagccctccttgactccccagtctagaagcagcctccagtcactatggcttcatcctgagttttttttttttttttttctgagacggtgttgctctgtcgcccagactagagtgcagtggcgcaatcatagctcattgcagcctccacctcctggactcaagcgatcctcttgcgtcagcttcctgagtagctgggactacaggtacatgccaccaagcccagctaattttaaaattttttgtagagacgggggtctcgctatgttgcccaggctggtctcaaaaccctgggctcaactgatcctcccgcctcagcctcccaaagtgctgggattccaagcatgagccactctgcacccagccccatcctggttttttttttgttgttgtttacatgctcttgacatctaattaccttatttcacatttattatctgtctccccgactggatggtgagtttgtcggggaggggcccagggtggccttggttaccaccgagtccctggtccccagccaggccctggcacacagtaggcgctcaataagtgtttgtcaggttaattcgtgtgctggaggcggaacccagccgggcactctgggctttctgccactggggccttttactggctggatctgctctgctgtgtgtctttaagaaaatctcgtacctccctgggtctcagcgccactgttctctcaaacagcaggtcctacgcccctctctcacctctcctcttttcctcttgttaacacaggccagcgggttcccaggcagtagttgtggagtccgggagagaacaagtttggagttggatccaggttccaatcccagctcagacacttgttacttttaattaaaaacatttttttttggccaggtgtggtggctcatgcctataatcccagcactttgggaggccgag[133 bp omitted]gaggcaggagaatggcgtgaacccggaaggcagagc[131 bp omitted]actcctggtctcaagcagtcctcccaccttcgcctcccgacatgctgtgattataggcatgagccaccacaaccggcctcagctgcttacttgctgtgtgcccttgaataagtcacttaacttctcttagcctcagtttccctacgtggaaaacagggctaataataataacatgtttttcagggactgtgggagaattaaatgtagaggaaagcactcatcacagtgtctgcctctaaataatggaatagccaacattgctggtgttgttattgttgttaggccag[136 bp omitted]atctctactaaaaatacaaaaattagctggacatggtggctcgtgcctgtaatcccagctacttgggaggctgagacaggagaatcgcttgaacccaggaggcagaggttgcactgagctgagatcgctccactgcactccagcctggcaacagagcgagactccatctcaaaaaaaaaaaagaatatataggttataggctgggcacggttgtcacacctgtaatcccagctctttgggagtctg[136 bp omitted]gaggcaggagaaccgcttgaaccccagaggtggggttgcagtgagccgagatcgtgcaactgcactccacagcgagacttttgtcttgaaaaaaagaaaaaaatagaggttttgcagccattgattggataataaaagaaaaaagaatatggagggaggagtgttggaagtgagtctttgaggaatgagtaggagtttgctgaccacctgtgttcaaatcccagctcagccacttaggttgtttgaatctgagcaagttacttcacttctctggacctcagttttccacctaccaaatggggataaaatagtccataccttgatacaagttactacatgtaaagtgcttagaatggcactaatagtgttgttcatgagtgttagtttcagttattattactattattattagagacggagtctcgccctgtcgcctaggctggagtgcactggcgcgatcttggctcactgcaacctccatgtccttggttcaagtgattctcctgcctgatcctcctgagtagctgggactggtggagtgcaccaccacacccggctaatttgttttttgttttttttttttgtattttcagtagagatggagtttcaccatgttagccaggctggtctcgaactcctggcctaaagtgatccacctgccttggcctcccaaagtgctgggattacagctgtgagccaccgcacccggcccagttattattattattattttatttatttatttttttgagacagagttcgctctgttgcccaggctggagtacagtggcgcgatcttggcccactgcaagctccgcctcttgggttcacgccattctcctgcctcagcctcccaagtagctgggactacaggcgcccaataccacgcccagc[146 bp omitted]tattattattattattttaccactattattatcatgaaggagccaccatactcctccccagaaaccactatccctgaccatccatccctcagcttcactttggcaaagacagacccagagtccctcaagacaagctcatgtgctgggacttgatgcccagggtagcaggaagccagcgatagttctagcagttgggcagcactcagcttctgtgctgggggaagaagaggagaggctggacctctttctccggcagacctggaaggggcggctgggggtgtctgtgtctgcaccccctgacacatgaagccacccctaggttggcctctggcccccgcagacgcagtatcggaaccagctgtgcttgccagatgttcctggtttgcccccagatgtgtgtcgccagttcgaggctgtcctggctgcctcatccctcccatggggtgggcccaggccctggggccctctgagggagggggcacatttttgtgggctgtggaatttgttttgtgttttgcagaatcactgagtcttgccttgagaggcccagacccctggccaagtcttgcccctcatggggcctcagtttctccaccagtggaacctcagggaactcctaggggcgatctaggaacaggagaccaggaggctgccctaggaacaggcccagctgtgagccctcgagctatcagcacttggggaaaacagaggcacaggcgcgcgaacacatgtatgccgcggcgttcacacacacaggcacttccccactggcatgttctggcttcacggcctggcatcctctacccatgggcagtggcaagagcacaagagccacttggtcaagctcttccaggtcctctctggctttcctacagtgctgggtggcacccttcgtgccctattgaagatgggaggccaggcatggtggctcacacctgtaatcacagcactttgggaggcaaagaagggaggatcgcttgaggccaggagttcgagaccagcctgggtaacatggcgagactttgtctctattaaaaaaaattttttttaatttaaaaaaaaaaacagatggaggctgggcacagtggttcatgcctataattccagcactttgggaggcagaggcgggcggatcacctgaagtgaggagtttgagaccagcctggcc[142 bp omitted]ggtggaacctcgtttctaataaaaatacaaaaaaattaaccaggcatggtggcttatggctgtaatcctacctactcgggaggctgaggcaggaaaattgcttgaacctgggaggcggaggttgcagtgagctgtgatcatgccactgcactccagcctccagcttgggcaacagagcaagactccgtctgaaaaaaaaaaaaagccaggcatggtggcgcacacctgtagtcccagttactcgggaggctgagacaggagaatcgcttgaactcgggagccagaggttgcagtgagctgagatcgcactgctgcactccaacctgtgtgacagagtgagactctgtctcaaaagacaaaatacaaaaattagccaggcatggtgacaggcatctgtagtcccagctgcttgggaggctgaggcaggagaatggcttgaacctgagaagcagaggttgcaatcagctgagataacaccattgcgctccagcctgggcaacagagccagactccgtctcaaaaaatatatatatatatggggaaactgagtcacaggaggaccaggagtgaaacggagaggaaggagaagtgtatgcagggcagcacccccacaggcaaaagtgtgcagacttgggatctgcagcaagctcacccctctgtaaactgaattctcaaagtcagccctgtgccctgcaaaaactcagccgaagatgtccctctagaaactcccatccagcaaagacagtcatgggcacagacaccacgcttacagggctgggcaagaggaaggcacccatggctgggggtggccaagatgggtagcagggaagggtttctggtggaggggctgtaggagctagggctttcagggtagagtaggagtttgccaaattaagataggccccaattccaggcctccccaagattagaagagatgcctacatggagagagggtccccctccctttcttcatctctcaggtgctactctttgagatcgggagttctgtaggacagaggcttttatccctgggactgggtgtgcccggcaggtgtcccctggggagttcggtgggaaggggagtgggggtgccagggcgttgcctgtgcataaagataatgagcaacatttcctggcatcaccaaggaaggtgccagaaacacacacccttgcgctggctgtctgttgctttggttgattggaagggcctgcctagctgtgtgacgttgggctgctctttgcctctctctgagtccatttcccttctttccccttccttccccagctgtggggattgtgtggcctccagctaaaagtggaggtctgtcctaggtccttcttgctgcacctcacactgctacgctcccagcccctccaggaaggaaggaggcttccctccctccaggcaatgcaggttctccaggatttctacgttttctccaggactgggaagggatctctagccaggccctgcacaggcaatgtagacggcacctgggatccctgcaggggtggacacgggcagtggtcagggcggggccgttccctcctgagtcccccggccccatctgcttcccctcctctcactctcctcccaccgtgtctgtgcgccctggaatctttgcagctgtgggcgttggtggcgtgttcacctgtgcacccctgtgtgtgtgtgtggccaggaggagggtcttggggaccttggccagagcacaaatgacaatggatgctcttgtgtgtgtctctgtgagaccggattaccacgtgtgagtggggaaaacctgtgtgtgtaagtgggatcatgcttgagtgtgagtgtgaaaacaccctggtttttcactgtggggttgttcaagtgtgtgtgtgtgtgtgcaaacaccagcacgtggatataacgtttcaccacaagtgtgaaagcactcaagtgtgtgagtgtgatttttttttttttttttttttggagacgaagtctcggtctgtcacccaggctggagtacagtggcgcgatctcggctcactgcaacctccaccccttgggttcaagcaattctcctgccttactcactctccctaatagctgggattacaggcgtgcactaccacacccggctaatttttgtatttttagtagagacggggtttcgccatgttggccaggctggtctcaaattcctgacctccagggatccgcctgcctcagccttccaaagtgctgggattacagacgtgagccaccgcgcccggcctgtttttttttttttttttttctttttgaaacagagactcactctattgcccaggctggagtgcaatggtgcgatctcgactcactgcaacctccttctcccgggttcaagcaattcttctgcctcagcctcctgagtagttgggattacaggtgcctgtcaccgtgcctggctaatttttgtatttttagtagagatggggttttgccatgttggccaggctggtctcgaactcctgacttcaagtgatccacccgccttggcctctcgaagtgctgggattacaggcgtgagccactgtgcctggccgatggtgtcttttaaaaatttattattttctatttttgtagagatggggtcttactatgttatccaggctggtctcgaacttccaggctcaggcgaactccccgcctcagcctcccaaagtgctgggattataggcgtgagccactgagcctggccgagtttcaccagtatttctgctaacgtcctttctctgtcccagggtccatccaggatcccagatgacatttagccatcccctttcctttggcccctccaatctgagactcctcctccatctgtctttgtccttcatgaccttgactctttttgtcttttctcttctcatcttcttttcttttcttttttcatttttgagacggagtcttgctctgtcgtccaggctggaatgcagtggtgcagtctcggctcgctgcaacctccgcctcccaggttcaagcgattctcctgcttc[137 bp omitted]tggcctcccaaagtgctgggattacagacgtgagccaccgtgccccgtcttgtcttcttttcttttctgagacagggtctccctatattgcccaggttggtctcaaactcctggcctcaagcaatcctcctgccttggcctcccaaagtgctgggatcaaaggcatgagccaccttgcccagccagtgagtgttttgaatgaaggtggaagcgtccaagtgtgtgagtgtggtcatgtttgagtgtgactgtgaaaacgccctagcatgtgagcacgacgtattcaaatgtgagtgtgagaacacactagtggattcatgcggtggtgttctggtgtgtggatgtgattgtgttagaatatgtgagcctggaaacatctgagtatgcatgggatcatgtttgggtgtaagtatgaaaatactggctgggtgcagtggatcacacctggaatcccagtgctttgggaggctgaggcgggaggattgcttgaggccaagagtttgagaccgcctgagcaacacagtgaaacccagtttctaccaaaaaacaaaaacaaaaacaaaaacaaaaatatagcgaggcatggtggcacacacctgtggtcccagctacttgggaggctgaggcaggaggatcacttgagcccaggactcagaggttgcagtgagccgaggttgcgccactgcactccagcctgggcaacagagcaagattctatcaaagaaagagagagagagggaaggaaggagggaggaaaggagtgagggagggagggaaagagagagggagagagagaaagagagaaaggaaggaaggaagggaaagagagaaagagaggaaggaaggaagggaaagagagagagaaaggaaggaagggagggagggagagagagaggaagaaaaagaaagagaaaggaaataggaaggaaggaagggagggagggagggagggaaagagaggaaggaagggagggagagagagagaaagaaaaagaagaaggcaggcaggcaggcaggcaggcgtgtgagtgtcatcatggtcaaatgtgtgattgtgtttcaatgcgtgtgaaaaagtccaagtgtgtgtgagtgtgaggacaacccaggatgtgtgtgtaaccctgtttgagtgtggaaatgtgaaaacagtgaatgtgggagtgttttgttttgtttcgtttccagacggagtcttgctctgtcaccaaggctggagtgcagtggtgtgatctcagctcactgcaacctctgcctcccgggttcaagcgattctcctgcctcagcctcccgagtagctgggattacaggcgcacactgccacacccggctaattttttttcttttttgagatggagtctcgctctgtcgctcaggctggagtgcagtggggagatctcagctcactgcaacctccacctcccaggttcaagtgagtctcctgcctcagcttcccgagtagctgagattacaggcgcccaccaccacacccggctaatttttgtatttttagtagagacagggtttcaccatgttggccaggttggtctcgaactcctgacctcaggtgatccaaccgcctcagcctcccaaagtgctgggattacaggtgtgagccactgcacccagccaaatgtgggagcgtttgagcacgcaagtgtgctcgagtgagaatgcttgagcatgtgagtgtgatcgtgtgtgggcagtgtgtgagtgtgtgagtgtgtgtatacgagtatgaaagaacctgagtgtgaggatatgagatggctgggtgtgaatgagtgtgagtgggcacacaagtgtaagcctgacagtgtgctgtgtgagatggggcatctcgctatgttgcccaggctggtcttgaactcctgggctctggcagctgtgggtgctggcagcgtgttcacctgtgtacccctgtgtgtgtggccaggatgaggggtctcagggcacagatgataacctgagctagattgcaaatgacagtgggcactcctgtacctacaaatgtgtgtctctatgcagttggacaggtacagatgcctccctaggttagggcctccgggacacaggaacacgcattgtgcacacccagccccctccccgtgccctccgccacacccacatcacccccacctggtcgcgtccgtgccagagacaaaccagttaggtggcccccgagaacagagaggcccattgttcatggctgctaatcagccctgcctgctgggccccctccgccaatggccccccgatttcctgccctccaccagagctctaggtggggagagtctgaagctccaaggcctccagggggtcctgtgaccaggccatgctggggctaggcccttggtagaaacagaccaccacagcccaagacttgttccaatccaatggggaaactgagtcacaccactccaagacttgaatgtgtgggcaagcagggtggagggggtccagagaggtccggggcccgggtaggtttcctgcctgtctccccctcctaccaccagcattcaaatgctggctctatgaccttggacaagtcacttcccacctctggacctgtttcccattcatgcagtggggataagggtattacttgcagccaggcgcagtggctcatgcctgtaatcccagcactttgggaagccaaggcaggaggctcgcttgagcccaggagttcaagaccagcctgggcaacatgatgagacatcgtctctacaaaaaatataaaaattggtcaggtgtggtggctcacgcctgtaatcccagcacttggggaggccaaagcgggtggatcacctgaggtcaggagttcaagactaacctgaccaacatggtgaaaccccatctctactaaaaatacaaaaaattagccaggcgtggtggcacatgcctgtagtcccagctacttgggaggctgaagcaggagaattgcttgaacttgggaggtggaggttgcagtgagccgagatcatgtcattgcactccagcctgggcaacaagagcaaaattccatctcaaaaataaataaaaattttaaaaaataaataaaaattggctgggtgtggtggtgcatgcctgtggtcccagttacttgggaggctgaggtgggaggatcacctgagctgggtaggttgaggctgcagtgggcgctgtgattgcaccactgtactccagcctgggcaacagagtgagatcctgtctcaagaaagaaaaaaaaaagtgggggtattacctgcttcttaggacgcttgtaaggttggaatgactatatctgtgttaagtttgtaaaatggggttggacataaagtaggtgatcattaagaataaaggggatgatggccaggcacggtggctctcgcctgtaatcccagcactttgggaggctgaggcgggtggatcacaaggtcaggagatcgagaccatcctggctaacatggtgaaaccctgtctctactaaaaatacaaaaatttagctgggcgtggtggcagacgcctgtagtcccagctactcaggaggctgaggcaggagaatggcgtgaacctgggaggcggaggttgcagtgagccaagattgtgccactgcactccagcctggg[131 bp omitted]gctaacacggtgaaaccctgtctctactaaaaatacaaaaaattagctgggtgtggtggcgggcgcctgtagtcccagctactctggaggctgaggcaggagaatcgcttgaacccaggaggcggaggttgcagtgagccgagatcgcgccactacactcagcctgggcgacagagtgagactccgtctcaaaaaaaaaaaaaaattacttagacatggtggcacattcgtttaatcccagctacttgggaggctgaggcaggagaatcgcttgaacccaggaggtggaggttacagtgagccgagatcgcaccactgtgctccacactccagcctgggcaacagagtgaaactctgtctcaagaaaaaaaaaaaaaaaaaaaaaaaaaaaaaggaataaaggggatgggtttgacatctgacaaaatgctgctgctgccatccgcttctgcaaaacctcaagaatgaaatgtccttcccatggcccacacgaggccctgcacgagctgcttcatccccttccaaacctcctctcctctctcttcccctcctcactctgctcagacacacgggcctcctcactgttcctccaacacgccacgtgtggtctgccccagggcctttgcacaggccatgcctctgcctggaacacctgcccccagattctcctatggctgacttctcacacttgggtcttagtgcatgcatcacctcctcagggagggccccctgcccacccccagtgaatctagccccattcaggacagtcatctttattatgcactgattgtatactaagcccagagacttcaactgtggtttctttttcatcctcccaataaatccatccatccatccgttcactcagacatgaaattctggaccctccaattcaggatctgggccacccagtgcctagcttttttttttttttttttttttttttttgcgacagagtttcattctgtcacccaggctggagtgcagtggtgcaatctcagctcactgcaacctccgcctcccgggttcaagcgattctcctgcctcagcctcccgagtagctgggattacaggtgtgccaccacgcccggctaatttttgtatttgtagtagagacggggtttcaccatattggccagactggtcttgaacacctgacctcaggtgatctgccctcctcagcctcccaaagtgctgggattactacaggcatgagccactgcacccgtcagcctagcttctttgtgttcattcattcattcattcatcattcagcaaatgtctatgagcgcctactctgagccactgaaccagctgggctggccctgggggagaatcgacttcccctgcaaattcactctcatcagatccccaggctggtctaggatttgtttagatgccctcacgttggggaactcattccttactaagaataaccaccaccaataccaaacagtctcaagtaccaccaatagtgctgagttctcagggtgactacagcatctgctcccaagcccagcccagcccatatggtgtgtgctgtgtcaaagaacctgggttcaaatcccatgtccttttctaacccttggacaagcccctacccattttgtgcctcggtttccctagctgtaaaatggagatagtagtgcctctcttgtgggctcagcaccaggcctgttacacagctggtgcttaataaatgtgtcctgttacttaaggtctgatatgtgtagctcctgtcgtcgccgtccatgggggtgagtggggtggggaaggggtggtttgagtttctgcacatcaggacacgaggcgcggtccatgcaaatgaaatgcaaatcccatgcaaataaatctctgggtggtgcagggcagcgtgcaaggctggaggtacaaggtgcacgcatttggggggcgcctgggaaccccatgagccgagcccaggcccggaggtgctgacccgcatccagcccggctttcagtgctcggtgtaaatgtttacacctggccggccgccaggctccacgccgccccacactaggcagccgggagggggaatgtaaactcgggctgggggccgcgggacgctcgggaggagcccagacggcgtcgagtgtggtgggcgtgtacacgtgagttattaaacaccgactgtatgcagtgaggaggatgccaccaggcactcacagcaccaagtaactggtgcccgaatgggtaaagctcagggcattcctgggggcccactagcgcccctgcaccagccagaggttgaagtgaatagggtaggcagccatggaaggctccctggaggaggcaccctccaagctgagattgcaaggggagtgagagctaggtacagtgactcacgcctgtaatcccagctctttgggaggccaaagtggaaggatagcttgagcccaggagtttgagaccagcctgggcaacgttgtgagattcccctctctattaaacaaaaacaaaaacaaaaaaaattaaaaattagccaggcacggtggctcatgcctgtagtcagtcctagctacttgggaggctgaggtgggaggatcgcttgagcctaggaggtggaggctgcagtgagctgtgatcacaccactgcactccagcctgggtgacagagcaagaccctgtctcaaaaaaaaagaaagagagagagagaaagaaagaaaggaaagaaaggaagagaaaaagaaagagagaagaaagaaagaaaaaggaaagaaagaaagagaaagagagagaggaggctgggtgcggtggctcatgcctgtaatcccagcactttgggaggccaaggtgggcggatcacttgagttcaggagcttgagaccagcatagctaacagggagaaaccctgtctctattaaaaatacaaaaattagccagtcatgctggcaggtgcctgtaatcccagctactcggggggctgaggcaggagaatcgcttgaacccgggaggcagaggttgcagtgagctgagattgcgccactgcactccagcctgagggacaagagtgagactccatctccaaaagaaaaaaagaaaaagagaaagaaaggggagtgggagtggggagggagggaagaagtgttctccatgcaaggacctatctgtgcaaaagcccagagctgggactccatgtccagggcagctctggtccattgctgcccacttctgggcctgcttatccatctggatgggaaacaggctcagagaggggcagagtcaatggaggacaccagcatgtagggaacagtgtcagccccagattcctgcctccagactgtcctaaacaccaccctccccgcgcctttgtcccacactgccacctgccgggaatgacctctcctcctttcactcttccccctggctcctcagctgcagccgctccggcctccttgctgttcctgggatacgccacactcagtctggcctcggggcctttgcactggctgtgtcccctgcctgtgatgccattctcctctgcctggccaactcctacgtttattcaagtctggaccttgtcatcggctcctcaggaaggcactccgggacccccagatgggggcggttccctgtgactcctggcacggaggccaaccccttccttgttcaatggttccttgagggaccattcccatgtgattatcgaccattcggcaggcgttcaaagtcaaaggccccacactgagtcctggcccagcgccctgtgcccgttggctgctggagggacagacggggcgtgcggctgaccatcccgtgcccgcaggctgaggatgcagcgctggaaggcggcggccttggcctcagtgctctgcagctccgtgctgtccatctggatgtgtcgagagggcctgcttctcagccaccgcctcggacctgcgctggtccccctgcaccgcctgcctcgaaccctggacgcccggattgcccgcctggcccagtgtaagctcctcctctgtgtggggtcagatacccccaacgtaaggggtagaatttcaggcagtggagtgggaggtggtgggggggtgtcataggttttttaaagatagggccagccagcccccttgcagggaggcagggacagacatcctaaaagattattcagggcaaggcatggtggcgcctgcctataatcccagcactttgggaggctgagacaggaggatctcttgagcccaggagttcatgaccagccagggcaatgtagcgagaccgccatctctacaaaaaacttcagaaattagccaggtgtagtggcgcacgcctgtagttccagctacttgggaggctgaggtgggaggatcacttgagcccaagagttcaaggctgcattgagctatgattgcaccactatactccagcctgagcaacagagcaagattctgtctcaaaacattataataataaatacattttctaaaaaaagatggggtggagggaggttgcaaattcccccaatggcctggtggagctagggtgacttctgggaactggggtctttcggctcagctgtcacaaggaattaggctctgccctgaggtcccgtgggggccagatggagattagacctgggcattcgcctggttggcccccgcggcgcagcagggggggcggtgggaggagagagaggctggatctgaggtcccagtgacctgccccaggggacagggaccaaggggaggcgggagatggagcaggagctaaaaaccggaagaaaggcccagagattcgaaggggtgaggaggggtggagagaggagagacggggctgggggcacagacacgggcaaaagtgctgctatagggacacagaaatgcccaccctgagggcaagaccctcgcccaactccccaccaatccctaatgcctgccccaccgcaggtgctgtggggtgagggtggtgcgtgggccctgacccctgtgcccacgcacatgtccatgcgtgcgcctgcgcgggcatctgaggcgtggatgccggcagggtgcgtgtgcagcgcctttgggtgtgggccacgagtacgcccatgtgcgcgtctgcgcccgcccctgccagcccacacaatcctcttttcttgtccttacaatgcacaagggtggcctccagcacgagctccacttctgtcctcccaccacttccctctctgcaagcggcgtgaagtccttcctaggactctgggacagagacccgggcgggacccccaaaatccagtgctccaggacttggggtgcggggggcaaagcacgaatggaggaatttcaggcactgcggagggtcagggcccatgggcgggtgcctgtctgccctactgcaaaaagcgagtggccactgactccccaagtccccatgttctaggctcctggtggaatttcaggctggggaccttgtgttctagcccctgtgcaagcagccagccccgctgcagggaggcagggacagacatcctaaaagatgattcattgttgccaggtgcggtggctcacgcctgtgatcccagcactttgggaggccgaggtgggcggatcacgaggtcaggagatggagaccattctggctaacactgtgaaaccctgtctctactaaaattacaaaaaaattagccgggcgtggtggcgggcgcctgtagtcccagctactcgggaggc[144 bp omitted]ttagccgggcacctgtattgtatcgggcaagcccacaaatgtctgcttcgatgcacccctctggggttgggtgtgccccctaaccccccagcacagtcctggccactccagtcctgctccggggcttaaagaacacggactaggttgctcagtcatcgcccaccccccgcaccgatttcccaccctctcagccccggccaagacagagatcatggaagcttcatgggacagacagggaaactgaggcctgaggttgcaagtggcgaaagtggcagagtcatgctctgaggctgggtttgtctcgtttctgagaccccctgtgggaacagacatctcctcccccaccaaaccccaggagacagacagcccctccttccccagggccacccagaggctcattcttttgacagccaggtgcaccagcccggggggcaggtggggactaaagatttcctctcccaaccacaagcgtgactgccacctgctctggggctgggagtcccctgcctgcaggtccgccagcagcgctgcctgtcattccagcgtctgcagttctctcccggggcttccgagtttgggggtggagccaccgcttgggtaataaatttaggctgccaggccctgggaatcggtgacttgggcacctcctggcgagtgtgggagaaagcggctggacctgggccaaacttgggtgaacgatgaaggcaggaagaatgacctttaagcccgcctctgtcgctctctctcggccacctgctaatgatgtgaccttgggatggtccgttttgtcacctgtcacatgggggtggccttgacagtagctgctgccactccatggagtggggtccccacacaggcttcggatgcagtaggctgcggtacctgctgctcctctgcattctgagaaacccaaacaccccgattcatttcttggatagggaaactgaggctccactgcacagcggggcagtggggatggagggagtctgaaaagcccggggcctcagagcagacgtcggggcctgaagagggggctctagagacctatgacaacctcactaaagagggatagggcatgggaagcagccccccagtgctgcccagagaggatgcaccagtgtcctggggcagcccagcataggggcggggtccagatagatttgcgatggaggacgaggagaatggagcagcaatggggtgagagaggggcccagaggaggtgagttagagaccccggtcagctcagctcaaggtgagacgggctggaaagcggcccagaaaggatggaccaggttctgggcagccaatataggctcagggttcagaaaggggttttggaccagcgtaggggtgtgagtgtgtacgtgccccccagtgccgcccagagagggtgcatgagcagctcagcaagagggtggggaaatttgggacctgggagtgagacgagaagccgtctaggcctggcgtcccagcaagggtcttcgtttgcaggggtacagagagggtagggggctccctcccaccccctgcacccactgaccccccctcctttctcttcctcccctcgcagaccgtgcactcctgcagggggccccggatgcgatggagctgcgcgagctgacgccctgggctgggcggcccccaggtccgcgccgtcgggcggggccccggcggcggcgcgcgcgtgcgcggttgggggcgcggccttgcgggctgcgcgagctggaggtgcgcgtgagcgagctgggcctgggctacgcgtccgacgagacggtgctgttccgctactgcgcaggcgcctgcgaggctgccgcgcgcgtctacgacctcgggctgcgacgactgcgccagcggcggcgcctgcggcgggagcgggtgcgcgcgcagccctgctgccgcccgacggcctacgaggacgaggtgtccttcctggacgcgcacagccgctaccacacggtgcacgagctgtcggcgcgcgagtgcgcctgcgtgtgaccctacctcactcggccggcgcggcggccactccccccgcctcgacggcaccactggccggccccgcgaaagactgcgcgtgcgtagagcacgccggcgcggccccgggactctcgcgataactgtactgagataaagtgtggcaactcgagctggctggtgattcatcctcggcgaggggctcgcgtgtgggccacgtcgccgtctccaccgggaaagcggggaccagtggggggggcccagctgcagggtagtgggaggatgctgtttgctttgggggaagggtagatgcaaagtgggtccagtttatggcggacaaaaaggaaaatggggtgaatggggctatgttggcagggaccgtccttcctgcctccctacgggtccctctgcccgtcccgagcgtgttccggtccgcacctcttcgctgtgtgggcttctggggaggggaaagggaagctacgctcggatgaagagaccgaggtctaggtggaccccgtttccccagcttgttcccttccgcacctctccgcggtgcgggcttctgggatgaagacactgaagtctaggtgggcccagtttccccagattgtcgctgactgcacctctcgcttctgggatgaagagactgaggtctaggtggacccagtttccccagcttgttcctgactgcacctctctgctgtgtggacttctggagagggggaaagggggagacactgtgggtgaggagcctgagatccaggtggaatcagttccccagcgtctccctgtccgcactgatcccgctatgtgggtttctaggaagggggagccactctgggggtgaggagagtgaggtccaggtggacctgggcctcccttatccgacggcctcctcgggccggtcttcgcccaccagggtgagctgaaagccactatctccttccaccagctactaaaaatacccgcacgctgcccacctcccggcggggagaggcctggggcgggcgccagccccatccagcccgaagccggcgcctgctggtgtagagctgggtccccagagacctgggtcctcggcccataaaagccctggccgggcctccacgggggggatttacgacgagcccctgcggagtatggaaaaagcccggctcggtgtttagatttccccacggtgtcaccttgatgcttggcaggcctcgggtgttgggttgccagagcgcgggaggggtcggcgggtcccacggtcggtctgaggggcggggaaggggcgggcactgcgagcccagagcaggcaccggcgaggcgagactcctcccctcctgcccctcagactgggggttcccaaggctacaacccttctccttagctgggccccctcccctccttcccacacgtctgcccttaggaccaccctctaaccacagtgtcccttcccaggctcagcccgcatccccccaccccccgcaaagctggagggcgcagatcggaaaccgcccccagggagaatcacccagccatgaaggaacatccctagcccctggctcccggggacccacagctacagctggagacactcaaggcggctaatcagcaggacttccagggagccctgagagcagggcttggcggccaggcgggtgatctgcttgggaagcagtttcagggctgccgctggctggggtccccgcctacccccgcagtcttctgactctgaggtttaaggtggtggattcctccaccctttgggccgactcagcccggcctccgcagagaggccggagttcccagacgctgcggaagcccaagtgacgcttactccgagcctcagtttccccatcctagatggcctggcctcagagaggagtgttgttcagcccaggacacacagcgagaaagctgaccatcaggggtctgccgcccccccgaagctcccctgccacagtgtgcatgtgtgtgtgagtgttgcccaccctccggggcctcccggacctcggccttcctgtctcccacccagatccagcgtcccaaccacagggcgcgggcccagcccaccagggaattggaacataaataaaccgagaagcccctgcagttccctggggctgcggttgtcatcagcgcatcggcacaccggatgagggtctctctcacacacacacacaagcacactcacaagacacagagatcaccacccataagggctcagcaggcaggacccatgatcctacacagtcaccttccacacagaattgcacactcagaaagggacactcccccctttttttttttttcttgagacagtctcactgtgtcgcccaggttggagtgcagtggtgcgatcatggctccctacaacatctgcctcctgggttcaagcgattcttgtgtctca[149 bp omitted]tggttcaagcgattctcctgcctcagcttcccaagtagctgggattacaggcatgcaccaccacgcccggcaaatttttgtatttttagtagagacgggtt[132 bp omitted]tctggaaacggtgcggtgattatctctctgcacccctcacaggcggctaacaacatcacaaacaaatcagccagaaccatcactcatgggtggggccccatgggtgccagttcccagggcccagtgccctccagggtgaggtccccagcaggtgaggctcctagcaggtgagattcagtgtggaaggtctctgggagcaggtcccagcaggtaaagtccccaacagccgaggtccccagtaggcaaagtccccaggagacatccccagcaggccaggcttccgcaggggacgctcctggaagccagcatgtgaaatcccaggtaagggacatacctggccaccgaagactccagcaggtgaggccccaggaaagtgaggacccaggtaggtgaatccccaggcaggtgaagctgcaacaggtgaccgtcccaggcaggtgagtcctcaggcaggtgaagcttcaggcaaacgagtccttaggtagatgaggcccccactcaggtgaggccccaggaaaatgaggttcctggcagcccaggccccacaccagcctctcaggtgaaccaagccgctatgccgcgtgtctggtacctggattcctcctgcagtttccagcaggccttgcagaaagcgagtgcccagctgaaggagcgaggccgcagcgtctcccgccagcgaaagtagctcaggtagcgggcgtggtccttgtccagctcctgcaggtaccgggccaggtccttggggctctggaagtcgtccacgtggatgaaggcgtcgggtggcaggaacctctcgtagttgcttctgctggggcccagcaccacgggcacggcccaggcctccagggcgttcctccacagcttctcggtgatgtagtcggggtgcaaggagttctcgaaggccagatagaacttgtaccgggacagcgtctccatcatggttccctggggcaggggcttgtgggagcgtccgtacacgtccaccttgagatgggcctgcaggctctggtagtagcgcaccctggcggagtttggcccccagttggacactgcccaggccaccagctcggtcttggccgagaggttgagcggtgggtgggcaggctggccggaccacggctccagccagccgtagggcgtgaagatgtcggagtcgctgcggtaggacatggtgagattgaagtatccgtccatggctttcagctgccagcagtggcttggggactccatgctgaaccagatccatcgctgcccctgccgcctcggggagcgtgggagctgggcactggggttgtacatgacctctcggtggtgcacgatgaccgcgtctgcctgtggatacaccttgcggtcggcagtgatgttgcagtcagccgtgccaggcaccatctctgagcagcggggcagagctatgggtttgttaaaaggccacgtccacagcaggatcagggggatggagtgggcgggggtccctgtgctgtctgggaagcgggacccattagggtacacagtgggatcgtcttgagacacacgcagataggagaagaaacacacagccatcagcagctgaaacagcagcgtggtcagacagcagcgccacgaccactgtggcttggccgggcccaggggatccatgggtcagagtatctgggaagtggggagagaggagtgagggtcattgatgacaatctcctgcttaccaaagctccaggccatgagtcctgagaagagctgttattattcctgttacacagatgagaaaactgagaccaagtgactcacagcaaaagtcagcacagctggtgtttgaacaaagggagcttggcccagagtccacttcctcccacccattagacaacaggccctttctacatgggcaagggtccctggggaagttgggagaggccccaagggccctcaggtcccaccttgatcctgtccttttctggtgtgtccccagactcttcctcaatctggagagaagacacagccgatcataaatgccccccagtgcccctgagtcgaggcttgaacccatgactctgctggggaagggcacaatgggattgggttttggaggtaatataagagctcaccagatagagtagacctgtgggaaagggtgctcctggcagaggaaaccaccattgccaaggcctagtggggagagacccctgagcagtttgcagagaaagcaaaggaagtactcagggctgccagtgtcgagttcatattagattggtgcaaaagtaattgctgtttttaccattgaaagtaatggcagccatgcgcggtggttcatgcctgtaatcccagcactttgggaagccgaggcgggcagatcacgaggtcaagagaccagcctggccaacgtggtgaaaccccatctctactaaaaatgcaaaaattggccgggcgtggtggcgtgtgcctgtaatcccagctacttgagaggctgaggcaggagaattgcttgaacctggggggtggaggttgcagtgagccgagatcgcaccgctgcactccagcctgggcaatggaattctatcttggaaaaaaaaaaaaaaagaaatattaacttgggtcaagcacggtggctcatgcctataatcctagcactttgggaggctgaaggtggatcacttgaggtcaggagttcgaggccagcctggccaacgtggtgaaacccatctttactaaaaatacaaaaattagctgggcgtggtggcgggcacctgtaatcccagctacttaggagcctgaggcaggagaatcacttgaacccgggaggaggaggttgcagggagccaagatggcaccactgcactccagcctgggacacagaatgagattccatctccaaaaaaaaaaaaaagaaagaaatattcactcggggtttcattcaataagcactcagggccgggtgcattggctcacgactgtattcccagcactttggaaggcagaggagggcggataacttgaggtcaagagtttgagaccagcgtggtcaacatggagaacccacatgtctactaaaaatacaacaattagctgggcatggtggcacatgcctgtagtcccagctactcgggagacagagacatgagcatcacttgaacctgggaagcagaggttgcattgagccaagatcacaccattgcactccaacctgggtgacagagcgagaccctgtctcaaaaagaaaaaaaaaagagagaatagaaatattcactcagggtttctttcaacaagcacccaaaggttactcctctggtaggctgacgctgggggagaggtggggacagataggagggagaataggcaggcgtggggaccgataggagggagaataggcaggcgtggggactcacatgctgaccaggagggcagtggggccacccagagacatggggaacccccaggagagaagcaggctttggtggaacttgctgagcctggcccgtcctggagatacccagcagcggactggccccagggggctggagggagacaggggagggcccaaatcccccggagtgt[223 bp omitted]ctgagccatgagaatcgcttgaacccgggaggcggaagtagtgagccacctggatcacaccactgcactccagcagcctgggcagcagagtgagacgctgtctcaacagcaacaacaaaaaaaacaaaaacaggaggaaaccttcaaagagatggtgctgtggaggaggtggcgggaaaccggggccaccttttttcatgtatggggtgagacttggaggctgggagggacccttggaccatgataaggacctgctgccgctccctggacactgctgcgtctgacaccttctgggagatgctagagggactcggggatctggagacaggcctttcttctaaaagaggatgcactggatcccgtctggatgcccgtgacactgcaaaaagccagagacataaggggactgtgtccgtgaacctcaacagagcctggccactgagcctcagctttgaaggtctgaaggtctggccaatctcactccattcctaggtccttcccgcccccatagggtgtcacagagtcctccagaccccagatcctgacctcgggaacagaaatccaagaccccagccctgcccctctctgttccttgcagccctacagctgtccattctacagatgaggaaactaaggctcagagagacacctatgtgtcctgctgagtacacacaactagagccattttgatccagaccccaaagtctccccaccttaatgtcaccccaaactcctctaggactttgcagatggagctgacatctcccgaataaccttgtcccacagaactttctgtgatgatgggccgggcttggtggctcatgcttgtaatcccagtactttgggaggctgaggtgggcggattacctgaggtcaggagttcaagaccagcctggccaacatgtctctactaaaaatacaaaaattagtcaggtatggtggcaggagcctgtaatgccagctactcgggaggctgagacaagagaattgcttgaacctgggagacagaggttgcagtgagccgagattgcaccattgccctccagcctgggtgatgagagtgaaactccgtctcaacaaaaacaaagcaactttctgtgatgacggaaatgttctctacatgcagcatcaaaattggtggccaatgagcccttcaaaagtgaccatgctgtcggaaaaacagaatagttaatgctaattttttttttcatacggagtcttgctctgtcgcccagactggagtgcagtggtgtgatcttggctcactgcaacttctacatcctgagatcaagtgattgtcgtgcctcagcctctcgagtagctgggactacaagtgtgcaccatcatgcctggctagtttttgtatttttagtagagacggagtttcactatgttggccaggctggtcttgaactcctaacctcaggtgatccacctgcctcgcctcagcctcccaaagtgctgagattacatctgtgagccactgtgcccggcctggctaatgttaattttcttttcttttcttttcttttttgagacggagtttcacttttgttgcccaggctggagtgcaatggcacgatctcagctcactgcaacctccgcctcccgggttcaagcgattctcttgcctcagcctcctgagtagctgggattagaggcacgtgccatcatgcctggctaatttttgtatttttagtagagatggggtttcaccatgttgtccaggctggtcttgaactcctgacctcaggtgatctgcctgcctcggcctcccaaagtgctaggattacaggcgtgcaccacggcgcccggcccaatgctaatttaaacttaaaaatagatactggccgggagtaatggcttacacctataatcccaatgctttgggcggctgaggtgggaggatcgcttgattccaagagtttgagaccagcctgagcagcatagcaagacctcaagacctcatctctacaacgaattttattatttattattattattttgccagacatggtggcctgtagtctcagctactcaggatgctgaggcaggaggatttctggagcccagaagttcaaggctgctgtaagccatggttgcactattgcacttctgcttagacaatagaatgagaccgtgtctcaaaataaataaataaataaataacaacaaaaaataaaaacacagaaaacaaaaaccacaaaaaagcacacaagaaacagatactcaaaaagaaaaaaagcaatgactggtattacaggcagtaattgggaaacttttgagtaccttcagaacatcttggatgggcaaatctacttcttcacctgtactttttatgtttgtttgtttgttctgagatggaatcttgctctgtcacccaggctggagcacagtggcgtgatcttggctcactgcaacctctagctcccgggctaaagtgattttcctgcctcagcctcccaagtagctgggattacaggcgccccccaccacacccaggtaatttctgtctttttagtagagatggagtttcaccatgttggccaggctggtctcgaactcctgacctcaattgacccgcccacctcagcctcccaaagtgctggggttacaggcatgagtcaccacgcccagcctcattttatggaaactaaatacagattgagtagttatgacagacattgaatgtctgaattgtcttctgagggtaaaatgcacactagattgccaagatttaggatgaaaaacagaatgtcagatatctcaataaaactttttaaaggccaggcacggtggctcatgcctgtagtcccagcactttgagaggtgg[135 bp omitted]gaggcaggaaaatggtgtgaacccgggaggcggagcttgcagtgagccaaggtcgcgccactgcactccagcctgggcaacagagcgagactctgtctcaaaaaaataaaataaaataaaataaaataaataaactgagttggtctaaaccttatggtgcatagcggagctccaggcatggtgacctaggtgtgatgagaagggattgagagcacaagcgcataccaaagttctggaaaaagactcaagagacagccctcgagggacactcagagcccggactgggagggaggttgaattttaaccaagtattcctttgtgctgtcgggctcttgggctgccagtgaaaggttaatgtttagagatacatttaatattaatatattatcatgtggcccctgggtttatggcgacctcttcctaggagacagtgaagtctttgccggtgaccttcaggaggggagattgggggaaacggggaacgggagtccaggagagagatctcacccaaggtactttccctggaaaatgatcgatccacgccacaaagatcaggatgcaaaaaaacaaagccagaaagcaaaccgcattctaagccctcttttaccaccgggagtggcagaggcagagaaaatccggggccaggaaggatgaaggggtgtaggctgctgatggggtcggggggcacgggattctaccgcagagctctgcaagagagacagacagacacccacttcctcctggtttggcaaatcagccagacctcccatatcctcagcccacctcggtgcatccagaaagacccctgcctgcgactaggggctgctggccaaatgccaggccactgcacagcctgcagaccctcccccagggatcttgtgccagcccacccgcactctgaattacagcagacaggactgaggctgaggggaggaggctcggagccaggaggcctttccctggacccatgcgatccgggttgggggtgaaagtgggacaagaggccttacctgggggggccagtgtgcagagggccctagagctgagaggccgcggacggagtaacagctggattctgaggacgtggaagaggccacaccacgcagcagaaggaaggaggaagtgtacccggagctgaaaccaggccctttccaaccaccacacctgtcatcaggtgacccagggcatcctgtcctggagcccggacatcctttgaaaacaaatcgtggggctcccctaatccccgttgcagaaccaaacagggtgaagggatttggagactcaggtcatgcatgaccttgccccacctgtggcttcaatgcgatgtggctttgagtacaaagtgaaaaggctgacctgaaccaccggttcccaaagcgggttccacagggacaccaggggttccttgggaggtgggaatgaggaagtgagcagaatttctacctttccgctttccttcccaccagatcccaccttctcactcagttggcccatcaccaaatatttcctgagcactaagtgccaggccaagggatcttgcaggaaaccggtgggcaagtcaggcaactcatgaaccttggaagggaactttcttcaattaaaattgcagccttttgaataaaaaagggatggaagggcattccagttacaaggaacaaccttcgcaaaggccctgaggcagcagaaatgcaggcatgttgaggaactgcaggaggagtctcagcaggctgggtcttcaccactggagaggaggcagagctgttgcagaggctgggccacggtcagccatagggtgttcagcaccaaggcaatagggagccatgtgaggcttcaagcagaggggttaccatgtcgatacatgttttcagatgctctcttctggtaggctgggcacaggtcccatattggtggcagaagcttcctccggtggcctcaacaagcccctctgtgtgcctcaaagccacttcctttccccacccactcctgcagggcagtgcaaagcagaagtccagggagctatgcaaacttcctggaatggagagaaatgatctggaatactggttttgagggaggatgaccttaaactctctcactcccaagctgggtgcaaaggtgaccgagctcaaagcccagcctccaagtatcacgactgccctgttctagaaatcatttctgggaggctgcatcatgctgcctgagttctactatctcagtgcccagccacgcccagaccagtgaggttctgggaggtagggatgggccagggggttggggtctcccagagctccagaagtggcaacctaattccactcatgtctcattccttgactggtgaggttgactgtaacttattaaaaaaatgacttctgggggccgggcgtggtggctcacgcctgtaatcccaacactttgggaggccgaggtgggcagatcacgagatcagaagatcaagaccatccatcctgactaacatggtgaaaccctgtctctactaaaaatacaaaaaaattagccaggcgtggtagtgggtgcctgtagtcccagctacttgggaggctgaggcaggagaatggtgtgaacccgggaggcggagct[136 bp omitted]ggaaggagaggcaggaagatcgcttgagcccaggagtctgagaccagcctagggaaaacagagatacccctatctctctcttttttttgagatggaatcttgctctgtcactcgggctggagtgcagtggcacagtctcagtttactgtaacctatgcctcccgggctcaagcgattctcatgccccagcctcccgagtagctgggactacaggcgcgtgacacggcactgggtaactttcgtatttttttaatagagctggttttcgccatgttagccaggctgatcttgacctcctgacttcaggtgatctgtctgcctcagcctcctaaagtac[132 bp omitted]ctcctgggttcacgccattctcctgccccaagtagctgggactacaggcgtccgccatcacgcccagctaatttttttttttttttttgtattttta[146 bp omitted]aggtctctagtgagggacagtagggctctagtcattccatcgatgtgatcgctgggcaaagggagggtggaggaccttgggctgacctcagggatggtgccagagagaacgtgtgctcatcctgaaactgctgtgtgacttgagaggtttcctggtcctctctgagcagggctcaccataccagtgccaggtgggacctccctgccaaggagctgagcccagagcccagagtagggtatcatgaggacctcttccctcaggctcagggcaagctaggacctgcttgaggcttgcaggggcagttaggccatctgtgcacctcgttggggtcttggccctcattggaccctccagtgccttccctggccagggctgggtgggagatggagctgccagcctgctggaaatttttctccccctggggcccagggctgggagccaagggcagctggtgcccaggaggagggagaaggccccacgggctgggcgtgccatgaaccacatgtgagatccggggcatacagggaggcaatgggggtttgagggcagtgctggggttccagagggggcaggccagagccccccaacatcggccaggtggctgggcctctgccctcgtgggacccagggagggtttccatgtccctctaagcctcagaggaaattccagaggcagagaaagagaagttgggaaagggagctcttcactctgacatcagctgaggtagaggcggagaccacaggggctccaggggcgtcagaggacagagcagcctgtccccacacctcttaccccctggggactgggcctgccccagcctgttaggaagccctggcctggcctgccgagggccccgtccccctcccaggacccgtggcttgcagccaggtggtggggagaggggcccaggtgtgtggtgtgggtggcaggtgagtgatgggcccagcaaggctggctcaggcccggggtcaccagagggtttggtagagactcttcaggccccccacaccctccccaccctatgcccctccaccctcccacctgggcctcagggaggcatcacaggcacctctgcacctccactgtacagatggggaaactgaggctcagagagcacctgggattcaccaccaccacccacgtcttggtctcccctggcaattttattttactttattttattttatatatatatattttttttgagacggagtcttgctctgtcacccaggctagaatgcagtggtgcaatcttggctcactgcaacctccacctcctgggttcaagtgattctcgtacctc[134 bp omitted]ccacctcctaaagtgctgagattacaggcgtgacccattgcacctggcctattattattgttatttttgagatggagtctcactgtgtcgcccaaaccggagtgcagtggcgccatctcagctcactgcaagctccacctcctgggttcacgccatcctcctgcctc[179 bp omitted]gccggcctattattttttatttagagacgtggtcttgctata[136 bp omitted]cccagaatatttggaatgttccagaagtcctcatttacagtcgatcccacctgtaccctataagtggtggtcctgggcttgaacttggacctgtctgaactctgagctcttaacccctgaggtgagaacctggggtgagctcttaacccatgggaccaacccctctagagtgaggagacacgtcatcatttttccttgcagtattacatctggaaaccgtgccgtgatgatctctctgcacccctcacaggcggctaacaacatcacaaacaaatcagccagaaccatcactcccgggtggggccccaagtaagccagttccccagggcccagggccctccagggtgaggtccccagcaggtgagattcagtgtggcaaggtctctgggagcaggtcccagcaggtaaagtccccgaccgccgacatcctcagtaggtgcagcctccagcagccaaggtccccagcaggtgaggtccccagcaggtgaggtccccaacaggcgaggtccccagcaggcgaggtccctagcaggcaagtcttctggaggggagaggctcctggcagccgtgaagcccagcgtgtgaggtcccaggtaagagagagggttggccacaaaggactccagcaggtgaggccccaggcagatgaggttcccggcagcccaggcaccatgccggcctctcaggtgaaccaagccgctatgctgcgcaccgtctggtacctggattcctgctgcagtttccagcaggccttgcagaaatccagtgcccagctgaaggagcgaggccgcagcgtctcccgccagcgaaagtagctcaggtagcgggcgtggtccttgtccagctcctgcaggtaccgggccaggtccttggggctctggaagtcgtccacgtggatgaaggcgtcgggtggcaggaacctctcgtagttgcttctgctggggcccagcaccacgggcacggcccaggcctccagggcgttcctccacagcttctcggtgatgtagtcggggtgcaaggagttctcgaaggccaggtagaacttgtaccgggacagcgtctccatcatggtccccttgggcaggggcttgtgggagcgtccgtacacgtccaccttgagatgagcctgcaggctctggtagtagcgcaccctggctgagtccggcttccagttggacaccgcccaggccaccagctcggtcttggccgagaggttgagcggtgggtgggcaggctggccggaccacggctccagccagccgtagggcgtgaagatgtcggagtcgctgcggtaggacatggtgagattgaagtatctgtccagggcttccaggtgctggcagttagggggtggctccaagttgaaccagatccagcgctgcccctgcggcctcggggaaggtgggaggcgtgacttagggttggacatgatatcccagtggtgcacgatgaccatgtctgcctgtgggtacaccttgcggtcggcagtgatgtggcagtcggctgtgccgggcaccatctctgaacagcgggacagagccacagggatgtggaaaggccatgtccgtagcaggatcaggagggtggggcgggtgggagtggtgtcctgtcgggaggacccactgggagccctaggggatccagtggcatcgtctcgggacacacgcaggtaggagaagaaacacacagccaccagcagctgaaatagcagtgcggccagacagcggcgccatggccattgtggcttggctgcacccaggggatccatgggtcagagtatctgggaagagaggagagaggagtgagggtcattgatgacaatctcctgcttaccaaagctccgggccatgagtcctgagaggagctgctattattcctgtttcacagatgagaaaactgagaccaagtgactcacagcaaaaatcagcacagctggtgtttgaacaaagggaccttgtcccagagtccacttccttctacctattagacaagacctttcctggaatccccgaagtcttccccagtctactgaaatacaagtgccctggaggcaggggagaaggcatagccggtcatcattgcttcccatgtcactgaggcaaggcttgaatccatgactcagccagagaaaggtacaatgggactgggttttgcaggtaatatatgagctgaccggccgagcagagtggctcacacctgtagtcccagcactttgggaggccgaggtgagcagatcacctgaggtcaggaatttaagaccagcctggccaacatgatgaaaccccatttctactaaaaatacaaaaattagctgggtgtggtggtgcacacctgtagtcccagctacttgggaggctgaggcacgagaatcacttgaacccaggaggcggaggttgcagtgagccaagatgacaccactgcattccagcctgggtgacagagggagattgtgtctcaaaaataaataaataaataatagccgggtttggtggctcatgcctgtaatcccagcactttgggaggctgaggcaggtggatcacttgaggtcaggagtttgagaccagcctggccaacatggtgaaaccctgtttctaccaaaaatacaaaaataagccgagtgtggtggctcatgcctgtaatcccagctgctcgggaggctgaggcatgagaatcacttgaacctgggaggcagaggttgcagtaagctgagatcatgccactgcactccagcctgggtgacagagcaagattccatctcaaaaataaataaataaataatttttttaaaaaaagaccagcctgggcaacatggcaaaatcccaactctactaaaaatacaaaaatttgccgggcaaggtggcatgcgcctgtagtcccagctacttgggggaattgctttagtctggaagtttgaggctgcagcaagctgtgatcatgccacttaaccccagcctgggtgatggagcaagaccttgtcttaaaaaaataaaataaaaggctgggctcggtggctcacacctgtaatcccagcactttgggaggctgaggtgggcagatcccaaggtcaggagatcgagaccatcctggctaacatggtaaaaccccgtctctactaaaaatacaaaaaattagccaagcgtgatggcgggcgcctgttgtcccagctactactggggaggctgaggcaggagaatggcgtgaacccgggaggcggagcttgcagtgagccgagatagtgccactgcattccagactgggggacagagcgagactccatctcaaaataaataaataaataaataaataaataaataaacataaggtaatacacgaaaaacttttgacttacacaccttaaatggattcactgtatgggttgcgaattatatcccgatgaaactgttttcaaatgacatggtggttgcctgctttctctgttggaccgaactggtctaagccttgcagtgtcgagcggagctccctgtaggtcacctgagtgtgacgaaaagggatcccgacgccaagacctaagttcacaccaaggttctggaaagagactcaaaacacaggccctcaggggacagcctgagcccagagtgggagggaagttgaactttgaccaattactgctttgcacccttgggctctggggcctcaggcacgaggtaaatttttataatgtaactgatattaagatggaattacgtcagccctggatatatggcagcctctcctaggagacaatgaagtctttgtcagtgaccttcaggagggtagattgggggaaacaggtgattggtgggggcgattttcaggcctctgagcccaagctaagccatcatatcccctacgaccggctcatatacgttcaaatggcctgaagcaactgaagatctacaaaagaagtgaaaatagccttagctgatgacattccaccattgtgatctgtttctgccccaccctaactgatcaatatactttgtaatctcccccacccttaagaaggttctttgtaggccgggcacggtggcccaagcctgtaatcctagctctttgggaggccgaggcgggcagatcacgaggtcagaagatcaagaccatcctggctaacacggtgaaaccctgtctctactaaaaatacaaaaaaaaattagctgggcgtagtggcgggcgcctgtggtcccagctactccggaggctgaggcaggagaatggcttgaactcgggaggcggagcttgcagtgagccgagaaagagccactgcactccagcctgggcgacagagccagactccgtctcaaaaaaaaaaaaaaaaaggttctttgtaattctccccacccttgagaatgtactttgtgagatccacccctgcccacagaacattgctcctaactccaccgcctatcccaaaacctataagaaccaatgataatcccactaccctttgatgactctctttttggactcagcccgcctgcacccaggtgaaataaacagcctcgttgctcacacaaagcctgtttggtggtctcttcacacggacgcatgagacatttggtgccgaagacccgggtcagcgggactccttcgggacagcagtcccctgtcctcaccttcactccctgaagagatccacctacaacctcaggtccgcagaccaaccagcccaaggaacatctcactgattttaaattgggtaagtggcctcttttactccttctccaacctctctcactatccctcaacctctttctcctttcaatcttggcaccatccttcaatctctcccttctcttaatttaaattcctttcattttctggtatagacaaaggagacacattttatccgtggacccaaaactctggcgccggtcacggacttgggaaggcagccttcccttggtgtttaatcattgtggggacgactgcctgattattcacccacattccatttgtgtctgatctccgcggggacacctgccttggtcattcacccacatcccttggtggcaagtcaattgcagggacgcctgctttggctgctcaccttaccccttctctccgtgtctctaccccttctctactttcctgaggggcaagcaccccccaccccgtttccattttcctggggggcaagcacctcccatcccttctccactttcctgggggataagcatcccccaccccttctctccgtgtctctacccttctctttaaacttgcctacttcactatgggcaaccttccaccctccattcctccttcctctcccttagcctgtgttctcaagaacttaaaacctcttcaactctcgcctgacctaaaacctaaatgtcttattttcttctgcaatgccgcttgaccccaatacaaaccagacagtggttccaaatagccaaaaaatggcactttcaatttttccatcctacaagatctaaataattcttgtcataaaatgggcaaatggtctgaggtgcctgacgttcaggcattcttttatacatcggtccctccctagtctctgttcccaatgcagttcatcccaaatcttccttctttccctcctgcctgtcccctcagttccaaccccaagcgttgctgagtcttgaatcttccttttctacaaacccatctgacttctcccctccttcccaggctgctcctcaccaggccgagctaggtcccaattcttcctcagcctctgctcctccaccctataatccttttattacctcccctcctcacacccagtccagcttacagtttctttccgtgactagccctcctccatctgcccaacagtttcctcttaaagaggtggctggagctaaaggcacagtcaaggttaatgctcctttttctttatccgacctctcccagatcagttagcgtttaggctctttttcatcaaatataaaacccagcccagttcatggcccatttggcagcaatcctgagatgttttacagccctagaccctgaaaggtcacaatgccgtcttattctcaaaatgcattttattttattacccaatctgctcctgacattaaataaagctccaaaaattaaattccggccctcataccccacaacaggacttaattaacctcgccttcaaggtgtacaataataagagtagaggcagccacgtagcaatgtatttctgagttgcaattccttgcctccaccgtgagacaaaccccagccacatctccagaacacaagaactccaaacgcctgaaccgcagctgccaggggttcctccagaacctcctcccccaggagcttgctacaagttttggaaatctggccaccgggccaaggaatgcccgcagcccgggattcctcctaagccatgtcccatctgtgaaggacccccaatgaaaatcagactgttcaactcacctggcagccactcttttgtttagtttctcagttcatacaaaaccgcatccaggccatcaccaataattctatacgacaaacactccttctaacaaccccacaatatcaccccttaccccaaaatcttccttcagcttaatctctcccactctaggttcccacaccaacccctaatcccgctcgaagcagccctgagaaacatcgcccattatctctccataccaccccaaaaaattgttgccaccccaacactttaccactatttcgttttatttttcttattaatataagaagacaggaatgtcaggcctctgagcccaagctaagccatcatatccccagtgacctgctcgtatacatctagatggcctgaagcaactgaagatccacaaaaaaagtgaaaatagccttaactgatgacattccaccattgatttgtttctgccctaccctaactgatcaatgtactttgtaatctccccccaacccttaagaaggttctctgtaattctccccacccttgagaatgtactttatgagattcaccctctgcctgcaaaacattgctcctaactccactgcctatcccaaaacctataagaacaatgataatcccaccaccgttgctgactcctttttcggactcagcctgcctgcacccaggtgaaataaacagccttgttgctcacacaaagcctgtttggtggtctcttcacacagacatgtgagatcgcgatgaggactgagatcccaccccagttgaacccaagatattttttcctagaaaaagattaaaaaatgctactctgctgagacatcacaaagatcaggaagcaaaaagcaaaaaaatagctgggcgtggtggctcatgcctgtaatcccagtagtttcggagagtgaggtgggcagatctcttgagcccaggaattcaagacctgcctgattggccgggtgcaatggctcatggctgtaatgccagtacttgcggaggctgaggtgggcaggtcacctgaggtcaagagtttgagaccacccttggcaacatggtgaaatcttgtctctactaaaaataaaaaattagccaggtgtggtggcaggcaccttaatcccagctactcaggaggctgaggcacaagaattgcttgaacgagggaggcagaggt[137 bp omitted]aaaattaaaaagtatccaggtgaggtggcacacacctgtagtcccagctactccagagcctgaggcaggagggtcactcgagcccaggagtctgaggctgcagtgagccatgattgcatcactgcactccagcctgggcaacagaccaagattctgtctcaaagaaaaagaaaaaaaaaatgcatcttaagtccaccccaggcagggcagggccagagagaatccaaggccagaaaagatgagtggggggaggctgttgatggggttggggtgcagaggggactccactccagagctctgccagagagagagacaaacgtcactctttccttccggtttggcaaatcacccagaaccttccatgtcctccccaacggtggtgcatgccacacccagaaagacccctgcctgtgactagggggtgctggccacattccaggtcatggacagtttggtgactctccaccgggattttgtgccagcccagccacatcatgaatcagggcccataggatgggggccgaggggaggagggacggagccaggaagcctttcctgggaggtctcccaggcattctgggtggggggaaaaggtagaatgggataacttacctggagaggcagcgagcagtggatgaggacagctcaccaggaggccatggcaggtttcctggggcggggaggaagtgggaacagagaagaggaggaacaagtacgtgtacattgcagcacacacctgtcaccaggtgacctagggtgttctcccctgcagcagggatattgtctggaagccagtttccggggtgtcctaatctcgcctgtgagaccggataagggtgcaggaacttggaggcccgggacgtgacccgggctccatctgtagcctgaaggctgcctggctttgggtgcacagctggtccatccataaagtgaaaacgctggtctaaagctttgattctcaaagtgggtcccacgggggccccatgggtttctcgggagatggtaaagggagagaagtgagcagaattttaaccatcccacccattcagtcagtcaatcaacaaacattgcttatgcacctattgcataccagacccagggagagtgcagggagcaagtgggtgaatcagacaatacatgacttttgtaagggaacaattcttcaggcctctgagcccaagctaagccaccatctcccctgtgacctgcacgtgtacatccagatggcctgaagcaactgaagatccagaaaaaaagtgaaaatagccagttcctgccttaactgatgacattccaccattgcgatttgttcctgcctcaccctaactgatcaattgactttgtgacaatacaccacccccttgcaataatgtactttgtgatattcccccgcccttgtgaacatactttgtacaatataccctcgtcacccttgagaaggtgctttgtaatatcctcctccctgcccttaagaaggcactttgtaatattctccccctccagcccttaagaagatactttgtaatattctcctcacccttgagaatgtactttgtaagatctaccacctgcccgcaaaaaattgctcctaactccactgcctatcccaaacctataagaactaatgataatcccaccaccctttgctaactctcttttcggactcagcccgcctgcacccaggtgattaaaaagctttattgctcacacgaagcctgtttggtagactctcttcacacgggcgagtgtgacatttggtgccgaagacccaggacaggaggactcctttgggagaccggtctcctgtcctcgccctcactccgtgaggagatccacctgcaacctcaggtcctcagaccaaccagccgaaggaacatctcaccaatttcaaatggggtaagcagtcttttcactctcttctccagcctctctcgctacgcttcaatctccctgtccttccaattccagttatttttcctctgtagtagagacaaaggagacacattttatccgtgaacccaaaactccggcgctggtcacggacttggaaagacggtcttcccttggtgtttaatcactgcagggacgcctgccctgatcattcacccacattccattggtgtctgatcaccgcgggggacgcctgccttgctcatcacccacattcccttggtggcaagtcaattgcggggacacctgctttggctgctcaccccccaaagccccacttctccgtgtctctacctttctacgggcaaccttccgccctccattcccccttctcccttagcctgtgttctcaagaacttaaaacctgttcaactcacacctgacctaaaaacctaactgccttattttgcaatactgctaggccccaatacaaactcgacaacggttccaaatggccagaaaacggcacttttgatttctccactttacaagacctagatgatttttgttgaaacatgggcaaatggtccgaggtgcctgacgtccaggcattcttttttttttttttgagacggagtctcgctctgtcacccaggctggagtgcagtggcgcgatctcggctcactgcaagctccgcctcccgggttcacgccattctcctgcctcagcctcctgagtagctgggactacaggcgcccgccaccatgcccagctaattttttttatttttagtagagacggggtttcactgtgttagccaggatggtctcgatctcctgaccttgtgatccgcccaccttggcctcccaaagtgctgggattacaggtgtgagccgccatgcccggccgcgtccaggcattcttttacacactggtccctccctagtctctgctcccaatgcgactcgtcccaaatctttcttctttctctcctgtctgttccttcagtctgcaccccaagctctgagtcctttgaatcctccttttctacgaacccatctgacctctcccctcctccccaggctgctccttgccaggcagagccaggtcccaattcttcctcaacctccgctcccccaccctataatccttctatcacctcccctcctcacacccggtctggcttacagtttcgttccgtgacacagccctcccccacctgcccaacaatttcctcttagagaggtggctggagctgaaggcataggcaaggttaatgctcctttttctttagctgacctctctcaaatcagttagcatttaggctcttttccatcaaatataaaaacccggcccagttcatggcccatttggcaacaaccctgagatgctttaccaccctagacccagagggaccagaagaccgtcttattctcaatatgcagtttatcactcaatccgctcctaacattagaaaaaactccaaaaattagattccagccctcgaaccccacaacaggacttaattaaccttgccttcaaggtatacaataataaaaaagatacagccaagtggcaacgtatttctgagttgtaattacttgcctccgctgagagagaaacgccagccacatctccagaacatgagaacttcaaaacgcctaaaccacatctgccaggcattcctccaggacctcctgccccaggatcttgcttcaagtgccggaaatctggccactgggccaaggaatgcccgcagcctgggattcctcctaagccgtgtcccatctgtgcaggaccccactggaaatcagaccgtccaactagcctggcagccactcccagagcccctggaactctggccccaggctctctgactgactccttttcagatcttctcagcttagcggctgaagactgatgctgcctggtcgcctcggaagccccctggaccatcatggacgccgagcttcgggtaactctcacagtggagggtaaggccatcccctgtttaattgatatgggagctacccatccacattacctttcttttttttttgagacagagtctctctctgtcacccaggctggagtgcaacggagcaatctcggctcactgcaacctccacctcccgggttcaagggattctcctgcctcagcctctcgagtagctgggattacagatgcccgccaccacacccggctaatttttgtatttttagtagagatggggt[141 bp omitted]cccccataactgttgtgggtattgacagccaagattcaaaaccccttaaaactcccccactctggtgccaacttggacaacattcatttatgcactctttcttagttatccccacctgcccagttctgttattaggccgagacattttaaccaaattgtcttcttccctgaccattcctggactatagccacatctcattgccgcccttcttcccaaaccaaagcgtccttcgtgtcttcctcttgtatccctcccaccttcacccacagggaggggacacccctactccctccccggcaaccaatcacacgcccgttactatcccattaaaacctaatcacccttaccccgctcaatgccagtatcccatcccacaacaggctttaagggaactaaagcctattatccctcgcctgctacagcatgggcttctaaagcctataaactctccttacaattcccccattttacctgtccaaaaactggtcaagtcttacaggttagttcaggatctgcaccttatcaacaaaattgtttttcctatccaccctgtggggaccaacccgtacactcttttgtcctcaataccttcctacacaactcactattcagttcttgatcttaaagatgcttttttcaccattcccctgcacccctcatcccagcctctttttgcttttacctgggctgaccctgacacccatcagtcccagcagcttacctgggctgtactgccacaaggcttcagagacagccctcattacttcagccaagctctttctcatgatttactttctttccacccctttgcttctcaccttattcaatattttgatgaccttctactttatagcccctcctgcaaatcttcccaacaggacaccctcctgctcctccaacatctattcttaaagggatattgcgtatccccctccaaagccctgatttcttcctcatccgttacctacctcagcataattcttcatgaaaacacacgtgttctccctgccgatcatgtccggctgatctctcaaaccccaacccctcctacaaagcaaaaactctttccttcctgggcatggttgggtacttttgcctttggatacctggttttgccatcctaacaaaaccattatataaactcacaaagggaaatctagctgatcccatagatcctaaatcctttccccactcctctttccgttccttgaaaacagctatagagactgctcccacactagctctccctgacttagcccaaccctttttccttacacacagccgaagtgctgggctgtgtggtcagaattcttatacaagagccaagactgtgccctgcagcctttctatccaaacgacctgaccttactgttttaggctggccctcatgtctacatgtggcagcagccaccactttaatacttctggaagccctcaaaatcacaggccaggctccacttgccctctacagttctcacaaccttcaagcgttaatatcctcctcacacctttcacacctactgtctgcccctcgactcctccagctctgttcactgtttactgaaaccccaacagtaactattgcctatgggcccgatttcaacccagcttctcacttaacacccaacacaagtcctgaaccacatgactgtgtttccctaatacacatagcatcttccccctttcctcagatttctattcttccaattccaaacccaggccacacttggtttatcgatggcagtgcttctaaacccaatcaattttcaccagctaaagctggatatgatgtcttgtcccacacctttattatcgaagctgctgcacttcctccctccaccacttcccaacaagccaaactaattgctttaactcgtgcgctctctcttgctaacagaatgcacattaacatttacactgactccaatatgctttccacatcctccataaccatgctgccctctgggctgaaagaggcttccttaccacacaaggctcttccatgatcaatgcctccctaataaaggccctccttaaggttgctctcccgccggccatggctgcagtcattcattgtaaaggacaccagaaacctactgatcttattgcaaaaggaaatgcctatgtcgacaggacagcaaaagaaatagccaatgcctccacacctgccaatattccagcccccgctccagagggccagtatttttccacaaaagaagtgaaaatagccagttcctgccttaactgatgacatcccaccattgtgattggttcctgcctcaccctaattgatcaattgactttgtgacaatacaccctccctgcccttaagaaggtactttgtaatatcctccccctgcccttaagaaggtactttgtaatattctccccgcccatgagaatgtacttcgtaagatccaacccctgcccgcaaaaaattcctcctaactccaccgcctatcccaaccctataagaactaatgataatcccaccaccctttgctaactctcttttcggactcagcccgcctgcacccaggtgattaaaaagctttattgctcacacacagcctgtttggtgactttcttcgcaccgacgtgcgtgacacaatgtttgcagaatatgaaggtggctgtcacgtggtctgggcttcctggaggtttgagctgggagctgaagccccgtaggagttctgtaagtcaaaagggaagagaagagcattccacgtagagaaaagaatctgtgctccaggcgcggtggctcacgattgtaatctcagcacttggtgtcaggcctctgagcccaggctaagccattgtatatcccccgtgacctgcatgtatacatccagatggcctgaagcagctgaagaaccacaagagaagtgaaaatagccagttcctgccttaactgatgtcattccaccattgtgatttgttcctgtcccacctttactgatcaattaactttgtgacatttcttctcctggacaatgagtctcatgatctccctacccagcaccttgtgacccctgcccctgcccgcaagagataaccatctttaactgtaactttccactacctacctaaatcctgtaaaaactgacccaccccctatctccctttgctgactcctttttcggactcagcccgcctgcacccaggtgattaaaaagctttattgttcacatgaagcctgtttggtggtctcttcacacagacacgcatgacattttgggaggctgaggcgggtggatcacctgtagtcaggagtttgagaccagcctggccaacatggtgaaaccctgtctctactaaaaatacaaaaattagccgggcgcagtggtgggcacctgtaatcccagctactcagtaggctgaggcaagagaatcgcttgaatccaggaggaggagattgcagtgagccgagatcatgccactgccatccagcctgggtgacagagacgctgtctcaaaaaaaaagaatctgtgcaaagcagaggtccaggcgcattagaggagctgaaggaaactctaggctgggtcttcacaagcggaagatgagacagtgctgcttctggggctgagccacatccagccatggtcaatggtggcatgtttagcaccagggtgataggaagccgtgcaaagcttcaagcagtggggttgctttttttttttttttttgacacagaatctcactctgtcgcccaggctggaactgcaatggcatgaccatgactcgctgcagcctccacctcccaggctcaagcgatcctcctgcctcaggctcccgagtagctagggctacagccatgtgccactatgcctggctaatatggtttattttttgtagagacgaggtctcgctatgttgcccaggctggtttcaaactcctgagctcaagcaatctgcccgcctcagcctcccaaagcactgggattacaggcgtgagccactgcgctcggccatttttcttttcttttttttttttttttgagacaaggtctcactctcatccaggctacagttcagtgtggcgatcatagctcactgcagcctctaactcctgggctcaaatgatcctcctgccttagcctccctggttgctagcagtacaggcgtgcaccaccacgttaatttttaattttttttttttgagatggagtcttgctctgtcttccaggctagagtacagtggtgcaatattggctcctccgcctcctgggttcaagcgattctcctgcctcagcctcttgagtagctgggactacaggcacatgcaaccacgcctggctaatttttgtatttttagtagagatggggtttcaccatgttggccaggctggtcttgaactcctggcttcaagtgatcctcccacctcaatctcccaaatccctgggattacaagcgtgagccaccgcacccagccaggttaccatattaatatgtggtttgagatgctttatcaggacatgctgggcacaggccatcgggacagagcagaggagagcggggaggaagaggaggctgttttcaggtgtcctggcaagcggtgagggtcctctgccccagagcggtg[132 bp omitted]ccaacatggtgaaaccccatccccaccaaaaaaaaaaaaaaaaaaatacaaaaattagccaggtgcggtagcaggaacctgtaattccagctacttgggaggctaagacaggagaatcacttgagaccgggaggcgggggttgtagtgagccaagattgcgccactgcactctagcctgggagacagagcaagactccgtctcacaaaaacaaaacaaaacaaaaaacaaaagccctccctttccccaccctctcctgtaaatcacaggagaagtccagggagccagataagcttcctggaatggagaagagaaatgatctggaaggctgtccttgagacaggatggccttcaactctgtcagtcccaaactgggtgcaggggcgaccgaatctaaggtccagcctccatgtatgatgtcttccctgttctagaaatcatttccaggaggctgcttcacgctgcctggggttccaccatctcagtgcccagccaggcccaagacagtggggaagattgaggggacagggctgggccagggactggagtctcccaggcaggccatttccagaaggggtgacctaagtctgctctctgctcatgtcctcgctgggggcattctctgtgactgattaaaacaacttgtggggttatcagtcttggtatcactttgtcctggtgttagaggaaaggggttccaatcagaccccaagagagggttctgggatctcacgtaagaaacaattcagggctagtccctagagtaaagtgaaagcaagtttattaggaaagtaaaggaataaaagaatggctactccatagagtagccctgagggccgctggttgcccgtttatggttatttctttttttctttttttgagacggagtctcactctatcgcccaggctggctggagtgcagtggtaggatctcagctcactgcaacctccacctcctgggttgaagcgattctcgtgcctcagactcctgagtagctgggactacaggcgtgcgccacctcgcccagctaatttttgtatttttagtagagatggggtttcaccatgttggccaggctggtctcgaactcctgacctcaggtaatccacccaccttggcttcccaaagtgctggaattacaggagtgagcaaccacacctggcctgaaccaccgtgcccagctggttatttcttgatgatatgctaaacaacggggagattactcatgcctcccctttttagaccacatagggtaacttcctgatgttgccatggcatctgtaaactgtcctggtgctgctgggagtgtggcagtgaggatgccctgaggtcactctcatcaccatcttggtttgggtgggctttgaggatgccctgaggtcactctcatcaccatcttggtttgggtgggctttgaggatgccctgaggtcactctcatcgccatcttggtttgggtgggctttgaggatgccctgaggtcactctcatcgccatcttggtttgggtgggctttcaccggcttctcaactgcaacctgttttaccaccaagggctttatgacctgtatcttgcgccgacctcctgtctcatcctgtgacttagaatgacttaaccacctgggaattcagcccagtgggtctgagcctcattttacccagctcctattcaagatggagttgctctggttcacatgcctccgagagtggagccccagccaagcccggatgggcaaggcttccgccccacacagctgtcctgtggatgtgaagacaggtcctgagagagggtgttcattgctgagtcacttggagtttccaaggtagcaggctgtctccagctggacaactgcgctctctgccccctgcctcctgcctagttcccgttcttcagggcttaggtgcagacagctcccctaggaagcctccacagatagcggccctcttccagccagatcaattccttccactggctcctgcaactgcctctgtctcccctgtcctagctcaggccacactgtgtcccttctttcccctgctgggctggcagcctcgtgaggacagaaaacctagaagagcaagagatgagggaagctggagtgagaaacccgagggtaggtctctagcggagggccacaggactctgcccattccacagttgtgatcaccaggcaatgggaggctgggctggctgaggcaatggtgctcctcctgcctcaggcaatggcaatgggggccaagtccacactccaggctgagctccaatcacacctgaggccagactctgcctaagccccaacagcaagaaagtagaggttggtaaatgctttcttgggtcattttttttttttttttttttgagacagttttgctctgtcgcccaggctggagtgcagtggcacgatcttggctcactgcaagctccgtctcccgggatcacgccattctcctgcctcagcctcccaagtagctgggactacaggcgcccgccaccacacctggctaattttttgtatttttttgtaatagagacggggtttcaccgtgtta[131 bp omitted]cacatctgccctttcctgcgtgtcctgtccctctacagggactggaaatgaatcccatgcttttttttttttttttggacagagtctcgcactgttggagtgccgtcgcccagtctcagctcactgcaatctctgcctcccaggttcaagtgatcctcctgcctcagccccccaaggagctgggactacaggcacatgccaccacgtccggctaatttttgtaattttagtagacacggagtttctccatgttggtcaggctggtctcaaactcctgacctcaagtgatccgcccacctcagccttccaaagtgctgggattacaggtatgagccaccgtgcccggccacatgctccttttgacagagcagggcagaagacagattcctggtgaggtcaccccaccccactcaaatgtggtcattaccgcactggcactgtcacccgtggagcccctgccctgtccccaagatccgccctggcagctcacggcccacatctgattggccctcaccctgaatcacttcttgtgtcctttgaactggttccctcctcctgtaacatccaaccccagtccaccttgttcatgtagccaggagttgggagggctgcgggtggggattgggattgcaacccaggccccttggccatcagatccacaactggactagcctccagccactgagatctggaagaggagctgcggcgaattgccagagacagtgtgtgcttatcttgaaattgctgtgtgacctgagagattccctggccctctctgagcagggctcatcaggctagtgccaggtgaggtctccctgtcaaacagctgagcccagagcccagattgggggatcacgaggacctcctcgttggggtctctgccctcatcagaccccccagctcctccctcagcctgggctgggtgggtgatggagcagctgccagcctgctggaaatttttctccccgtggggcccagggctgggagccaagggcagctgccgctcagaaggagggagaaggccccacgggctgagctgggtgcgccatgaaccacatgtgagatccggggcatacagggaggcaatgggggttgggagccatcctggggttccagagtgggcaggccagggtcccccaacgttggccaggtggctgggcctctgcccttgtgggacccaaggagggtttccatgtccctctaagtctcagaggaaattccagagggagagaaagagaagttgggaaagggagctgttcactctgacatcagctcaggtagaggtggagaccatgggggctccaggggcgtcaggggacagagcagcctgtccccactccaactccttacccccagcggactggccccacaccaccctgttaggaagacctggcctggcctcccgtgagcccctgatcccctcctgggacccctgacttgcagccaggcagtggagagaggggcccaggtgtgtggtgtgggtggcaggtgagtgatgggcccatcgaggctggctcaggcccggagtcacaagggggtttgacagagactctccagtcccctcacaccttccccaccctatgcccctccaccctcccacctgggcctgggggagccatcacaggcacctctgaggcatgtccactgtgcagatggggaaagtgaggctcagatagcaccggggagtcaccaccaccctccaccaccaggtcccccatggcattctccagagagcagcaatttcccccaagcccagaatgttccagaatgttctggaatgttccagacgtcctcatttacagtcagaagccacctgcagcccctaagtggtggagcagggctctatgcagggcttgccagattttggagttcttgacctgagatcttcagaaaaccgactttcgcctctggcagctgtgtggccttgggtgagttcctcaacttctctgggcatcagccacctcctctacagagtggagccactgccggcaccttcttcaggaggctgaggtcatgctgatcctcccaccacccccgcagggtctctgcgtacccccctgcagggaggaatgtttggcctgggtccctggccctctgtgggcctcagtttcccctcctgtaatacttttaagaagcccacctctccctgcccatccacaaggccacacacacggtcacagccacttgcagacacagcttaagagtcccacatgtgtccccacacagcccacttcaccacacccaaggacacaggtccatgcagacacagccttgcgcagttacacagagacacacacagacttggagagcccagcacactcagaggggccgctgctccgtccaacactcaaagcctcactcccaggccacacattccgtctcacactcacaatcaccgccacctacgagcacccacatagagccacaggcaggcatcgagacacatctgcaggcactatcagagtcacgctgaggtcacagccacagtgatgcgttggtgacacccacccgctggcggtcacaccgagtgtcccccagccaagtgcacaccactgctgacggtcacacacataccctttgccctcctccttaggggaccctgcccttccctgacctgccctgcacaccttgggcaacacatccagctcccctggaccccgtaccctgggcagagagggtccctttatcccagccctgcccaccttcactcctggagagcgtgggccccactcctcagccctcagagcctgcatgtccactgtgcaaatggggagattgaggctcagagagcacctggaattcactaccaccttccaccaccaggttccccttggcattctccagagagcagcaatttcccccaaggccagaatgttccagaatgttctggaatattctggacatcctcatttacagtcagaaaccacctgcagcccctaagtcatggagcagggctctatgcagggcttgcctgactttggagttcttgacctgagaccttcagaaaaaagactttcacttctgggtgggtgccagagcccaccccagggagccagctgaaggagaggacccccgagggatctgaacgcctcccccaagaggcttgacctccagggtcatagaaagttctagaacagggttttctgcccctggacatttggaaccatcattgttggttgtaagggccccgactcgtgcattgtagggggtttggagtaaccctggcctctacccactaggtgacctcatcctcctcccctggttgtgacaactgaaaatgtctccagacattgccaagtgcccttggggacagaatcgccctgcgtgagaaccactgttctagagtgaggggggacacaggagctttccttgaagcattctcgcctgaaaatgttaacagcattatctgtttgcacccctcatgggtggttaacaacagcaataaaaccacaagcaaaccagcctgcaccatcgcccgggggcagggcctcaagggcacccgttctcagggcccagtgccctccagggtgaggcatcgcaacacatccacaggcactatcagagtcacgccgaggtcacacccatagtgatgcatttgtgacacccatccgctggcggtcaaaccgagtgtcccccagccatgtgcacaccactgctgatggtcacacacatacccttcgccctcctccttaggggaccctgcccttccctgacctgccctgcacaccttgggcaacacatccagctcccttgggccctgtgcctcccagcgggtgaggctcctagcaggtgacattcagtgtggcaaggtctctgggagcaggtcccagcaggtaaagtccccaacagccgagatcctcagtaggtgcagcctccagaaagcaaggtccccagtaggcaccatccccagccccagctggcaaggtccccagcaggggaggctcctggcagtgaagcccggcaagtgaaatcccaggtaagtcacatgcctggccaccaaagactccagcaggtgaggccccaggcaggtgagaccccaggcagccgaggccccaggcagccgaggccccaggtaggtaaatcccccgactagtgagaccctaggtaggtgaggccctgggaaagtgaggtcccggcagcccaggccccatgccggcctctcaggtgaaccaagccgctatgctgcgcaccgtctggtacctagattcctgctgcagcttccagcaggccttgcagaaagccagtgcccagctgaaggagcgaggccgcagcgtctcccgccagtgaaagtagctcaggtagcgggcgtggtccttgtccagctcctgcaggtaccgggccaggtccttggggctctggaagtcgtccacgtggatgaaggcgtcgggtggcaggaacctctcgtagttgcttctgctggggcccagcaccacgggcacggcccaggcctccagggcgttcctccacagcttctcggtgatgtagtcggggtgcaaggagttctcgaaggccagatagaacttgtaccgggacagcgtctccatcatggtccccttgggcaggggcttgtgggagcgtccgtacacgtccaccttgagatgagcctgcaggctctggtagtagcgcaccctggccgagtccggcttccagttggacaccgcccaggccaccagctcggtcttggccgagaggttgagcggtgggtgggcaggctggccggaccacggctccagccagccgtagggcgtgaagatgtcggagtcgctgcggtaggacatggtgagattgaagtatccgtccagggcttccaggtgccggcagttgctgggggactccatgctgaaccagatccagcgctgcccctgcggcctggtggggggcgggaggttggcactggggttgtacatgatatcccagtggtgcacgatgaccgcgtctgcctgtgggtacacactggagtcggcagtgatgttgcagtcggccgcgccgggcaccatctctgagcagcggggcagagccacgggtgtgttaaaaggccacgtccacagcaggatcagtagggtggggtgggcaggggtcgccatgctgtcctggcagcgggacccattgggagccccggtgacaggttccactgccataagccctggcctaggggatccagtggcatcgtctcgggacacacgcaggtaggagaagaaacacacagccaccagcagctgaaacagcagcccggccagacagcggcgccacagccactgtggcttggctgggcccaggggatccatgggtcagagtagctgggaagagaggagagaggagtgagggtcattaaggaagatcacccacttcctggccacgtgtcctgagagaagctgttataatttatgacacagcttgtcataaatgcccccagtacccctgagttgaggattgaatttataactctgacagggaagggtacgatgggattaggttttgcaggtaacataagagttctccagataaggtaggagttgagggaaagggtgtccgttggatgaggaaagagccagtgccaaagcctggcggggtgagacacctgagcagtttgcagacaaagaaaaggaagtgctcagggcttccagtttaggcttgattttctattcacttggtctttcaatcaacagacactcaaagttaacccctctggccctcagacacactgtccccgtcctgggggagaggctgaggctggggagaggtggggaggataggagggagaatgggcaggtgtgaagactcaggagaggcaggggctgaccaggcagggagtggggggatctggggccccagggaggagcaggctttcagggaagacatggaaccccgcttgttctggagacacccagcacggaactggagggagcccagggccctcagagtgtaggcactgggtctgggaagcctgagaagaaaaaccttcaaagaggctaagagggcgaccggaggaggaggagggaacccgaaccatgctttgtgatgggtgaggtgaggcttggatgccagggtggactgtttacagttttaaatgtacatctaaaaactgaacagcatatttaaaaaaaattttataggccaggcgtgagggctcatgcctgtaatcccagcattttgggaggccaaggcgggcagatcacctgaggtcaggagttcaagaccagcctggccaacatggcaagactctgtctctactaaaaaatacaaaaattagccggatgtggtggtggtgcctgtaatcccagctacttgggaggctgaggcaggaaaatcacttgaaatgagcggagatcacaccactgaacgccagcctgggtgacagaatgagactctgtctcaaataataacaataataaatttataacacagcatcttcctctgtcacccaggctggagtgcagtagcatgatctcagcttactgaagcctcaacctcccaggttcaaatgatcctcccacctcagcctccagaagagctgggattacaggcaagcgccaccatgcccagctaatttttttttttttagacggagtctccctctgtcgcccaggctagagtgcagtggcatgatctcggctcactgcaagctccacctcccgggttcatgccattctcctgcctcagcctcccaagtagctgggactacaggtgcccgctaccatgcccggctaatttttttttgtttttagtagagatggggtttcaccatgttagccaggatagtctccatctgacctcgtgatccgcctgcctgggcctcccaaagtgctgggattacaggtgtgagccaccatgcccagccttttttttttttttttttttttaaatttacttttgagacttggctcactgcaacctctgcctcccagattcaagtgattcttgtccctcagcctcctgagtagctgggatgacaggtgggtaccaccatgcccggctaatttttgtatttttagtagagacagggtttc[132 bp omitted]aacagtattgttttggtagaaaccatgtcaccattgctacccaaaatttagtgcctaaaaagagaggtgcttatggtgtcaaatttccatacgattgttatttcttagtatgaaagaaaggatgtgaagtagctcattaatgattttctacattaattacatattgaaataacgctttggatgtattgggtgaaataaaatatatcattaaaattaaattggccggatgtggtgcctcacgtctgtaataccagcaatattgggtggatcacctgaggtcaggagttcgaggccagcctggctaacatggcgaaaccctgtttctactaaaaatacaaaaaattagccaggtgctggcacatgcctataatcccagctactcgggaggctgaggcagaattgcttgaacccgggaggcgggggttgcagtgagctgagattgcgccactgcactccagcttggacaacaaaagctaaactccatctcaaaaaaaaaaaaaaaaaaaaagaaaaagaaaaacattaaatttcctggtattcttttttaatgtggttgctgggaagttttctttctttctttctttttaaaattattattattttttgagatggagtcaccgtgagccactgtgcctggcctattgctgggaaattgtaaattacattcggggtagaaaacagtttggtgcttccttgaaaagcctgagagatacttatcacatcaccagcaatctccctcctaggtagaagccccaaagaattaacaacaaaaggacgcaaacagatacttgtacacccatggtcacagcagcctgactcacaacagaacaaacagcccaaaggtagaaactacccagatgtccatcaatagaagaacaaatatacctagtgtgatccatccac[131 bp omitted]aacccagtctctatggaaaatacaaaaaaattagctgggcatggtggtgggcgccagtagtcccagctacttgggaagctgaggcaggagaatggtgtgaacccaggaggcggaactggcagtgggccgagattgtgccactgcactccagcctgggtgacagagtgaggctccgtctcaaaaaaaaagagaaaacctgtctctactaaagatataaaaaaaagagccggcatggtggcacatgcctgtaatcccagctacttgggaggctgaggcaggagaattgcttgaacccgggaggcagagcttatagtgaaccaagattgcgccactgcactccagcctgggcaacagggcaagactctgtctcaaaaaaaagaaaaggagcgaggctcccacacaggccacagcgtggatgaaggctgaggacatcacattcaatgacagaagccagacacaaaatgccacacagtgtgtgatcccatttctgggaaatgtccaggacgagccgatccacagagacaggaagtagaacagaggtgactggaggctggagaggggagaatgtttgtttaacgggtccagagtttctgtttggggtgatgaaagttttggaaagatgctggagtgatggttgcacaacactgcacgcgatgccactgaattgtatgcttaaaaatgcctaaatgcgccaggtgcggtggctcacgcctgtcatcccagcactttgggaggctgaggcgggaggatcacctgaggtcaggagttcgagacaagcctggccaacatggtgaaaccccgtctctactaaaaatataaaaattagctgggcatggtggtgcacacctgtaatcccagctactcaagaggctgaggcagaagactcacttcaacccaggaggcagaggctgcagtgagcaacaagagcaaaactctctctcataaaaaaaaaaaaaaagcctaaatggtgaagtttatgttatacatatatgtatggatatatggaattacaatttaaaaataaggtggctgggcgcggtggctcacacctgtaatcccagcactttgggaggccaaggcgggcggatcaccaggtcaggagattgagaccatcctgactaacatggtgaaaccccacctctactaaaaatacaaaaagaaattagccaggcgtggtggcgggcgcctgtagtcccagctacttgagaggctgaggcaggagaatggtgtgaacccgggaggcggagcttgcagtgagctgagatagcaccactgcactccagcctgggcgacagagtgagactccgtctcaaaaaaaaaaaaaggtaacacaccaaaaaccattgacttatttacttgtacaccttaagttggctcactgtatggtatgtgaattacatcctgatgaaaccgtttatttatttttgagactgagtcttgctctgttgcccaggctggagtgcagtggcacaatctcagttcactgcaacctccacctctgcgttcaagtgattctcctgcctt[135 bp omitted]ggcctcccaaagtgctgggattacaggcataagccaccacgcccagccgatgaagctgttttaaaatgatgtagggttgccagctttctctgttgggccaagttggtcttaaccttgcagcaggtgacctgggtgtgatgaagtgatccagacacccagtcccaagctcatgccaaggttctggaaagagattcaaaacacaagccctcagggcacagtccgagcccagagtgggagggaggttgaactttgaccaattactgctttgtaccattggactctagagcctcaggcacaggttaatttttatttttaagacggagtctcgctctgttgcccaggctggagtgcagtggcactatcttggctcactgcaagctccgcctcctgggttcacgccattctcctgcctcagcctcccgagtagctgggactacagggcccggctaattttttgtattttagtagagacgggatttcaccgtgttagccaggatgctcttgatctcctgacctcatgatccgcccgcctcggcctcccaaagtgctaggattacaggtgtgagccactgcgcccagccaggcacaggttaatttttataaagtaattgatattaagatggaattacatgggccctgggttcatggcagcccctcttaggagacagtgaagtatattttaacgaggtatagaagggtagattggggccaggtgtggtgggtcacacctgtaatcctagcactttgggaggccaaggacagagaattgcttgaacttgggaggtggaggttgcagtgagctgagatcacaccactgcacaggagcctgggcaacagagcgagacgacatctcaattttaaaaaaaaaaaaaaaaaaaaaaaaaaaaagaagggtagattggggaaaatgggtaattcaggggtggtcagggctgaggtcccacccaagttgaacccaagatatttttttctagaaaaagaatgcctgggctggacacagtggctcatgcctgtaatcccagcactttgggaggctgaggcgggtggaccacctgaggtcaggagttcaagaccagcctggccaacatggtgaaaccccgtctttactaaaaataaaaaaaaaaattagccaggcatggtggtgggcacctgtaatcccagctactcaggaagctgaggccagagaattgcttgaatcagggaggtggaggttgcagtgagccaagatggcgccactgtactccaacctgggtgacagagtgagactccgtcccccccaaaaaaagcatgcccagttcctcctggtttggcgaatcagccagaaccttccatcccctcctccatcccactacatgcagcacccagaaagacccctgcctgcgactagggcctgctggccaaattccaggccactgcacagcctgcagacccttctccggggattctgtgcccatccagctgcatcctgaatcacagcagacaggaccggcgctgaggtgggaacaaacggagccaggacgcctttcctacgaggtctcccgtgatttctgggttggggataaaggtgccccaagactctctccctggatggcgggggcagcatgcccaggatgagagcacctcccaggaggctgaggacagagtaccagctggattctcaggacgtggaagaggccagaccaggtagcagcaggaaggaggaagtatacctggagctgaagccaggctctgtccaaccactgcacctgccatcaggtgacccagtgtgtcctgtcctggagctgggacatcctctgaaagcaaattgtgtgtctcctctaatccctgctgtagaattggaaagggtgcagggatttggaggcctaggtcatgaccctggtcctaccggtggcctcaatgcaatgcggctttgagcacaaagggaaaaggctgacctgaaccactggttcccaaagtgggttccatagggacaccaggggttccttgggaggtgggaatggggaagtgagcagaatttccaccttcccgccttccttcccaccagatcccacctccc[132 bp omitted]gaaaccccatgtctactaaaaaaaaaaaaaaaaaaattagccgggcatggtggtgcatgcctgtaatcccaggtactcaggaggctgaggcatgagaatcacttgaacccaggaggcaaaggctgcagtgagctgagatcaagccactgcactccagcctgggcaacagagcaagactctgtctcacaaaaaaaacacagaaccacaaatatttcctaagcacttactaagtgccaggccaagcactcctgcaaggagctggagggtgagtcaccgacaatacgcgagccttataagggaactaacaattaaaactgtggccttctaaacaaaacggggagggaaaagcattctgggtagagggaacaacctatgcaaaggccccgagggagcagaggtccaggcacgttggaggaactggggggagtctcagcaggctgggtcttcaccatgggagaagaggcagagctgtcgcagaggccaggccacggtcagccatggggtgttcagcaccagggcaatagggagccattggaggcttcaagcagaggggttaccatgttgatgtgtggtttgagatgctctcttttcttttttgagatagccttgctctgttgcccaggctggagtgcaggttggcgtgcagtggcatgatcttggctcactgtagcctctgcctcctgggttcaagagattcacctgtctcagcctcaggagcagggattacaagtacccgccaccatgcccacctaatttttgtatttttactagagatggggattcaccatgttggccaggctggtctcgaactcctgacctcaagtgatcagcccacctcagcctcccaaagtgctgggattacaggcgggagcccccacacccgtcctgagatgctctcttctgacacactaggcacaggccccactctggtggcctcaccaagcccttctgtgtgcctcaaagccactccctttccccgcccactcctgcagggcagtgtagaagtccaaggagccaggtaagtttcctggaatgcagaagagaaaggatgtggaaggatgtctttgacagaggatgtccttaaactctgtcactcccaagctgggtacagaggtgacagagcccacatttcaccttcaggtatcacgacttccctgttctagaaataatttccaggaggccgtttcatgctgccccagactttcaccgtctcagttcccagccaggcccaggccagtggggaggatcgactggccagggctgggccagggactgcggtctcccaggcaagccatttccagaagggatgacctgagtctgttctctgttcatgtcctcgctgggggcattgtctgtgactgattaaaacataactcatagaagttgggtatagtggctcacactcataattccagcactttgggaggccgaggtgagcagatcacctgaggtcaggagtttgagaccagcctggccaacatggtgaaacctcgtctctgctaaaaatacaaaaattagccgggtgtggtggtgcacacctgtaatcccagctactctggaagctgaggcgggagaatcacttgaacccgggaggcagaggtttgcagtgagctaagattgggtcactgcactccagcctgggtgacagagtgagactccatcacaaaaagaaaaaaacccaaaaaaacataactcatggggctctcagtcttggtgtgactttgtcctggagccccagccaagcctggaccggcaacgcttccatcccacacagctgtcctgtggatgtgaagacaggtcctgagagagggcgctcactactcaagtcactgggagtctcaatcgcaccaggctgtcttcagttggacagctgtactctctgccccctgcctcctgcttaattcccagtcatccttcagggctcggtgaaaacagctcctccagggagcctccccagataggggctctcttgccctcccagccagatcatcctttctactggctcctccaaccacccgtgcccctgattctaggctcaggccgcgaggatctcttccctctggctcagatgagctgagacttgcttggggggtgcggtgaggccatctgtgcccctcgttggggtcctggtcttcattggacaccccagctcctccctcagcctgggctgggtgggtgataaagctgtcagcctgctggaaatttctctccccttggggcctaagggctgggagccaagggcagctgccgctcaggaggagggagaaggccccataggctgggctgggtgcaccatgaaccacatgtgagatctggggcacatggggagacaatggggggttgagggcagtgctggtgttccagagggggcaggccagggtcccccaatgttggccaggtggctggtcttctgcccttgtggaacccaaggagggtttccatgtccctctaagcctcagaggaaattccagagggagagaaagagaagttgggaaagggagctgttcactctgacatcagctcagggagaggcggagaccacgggggctccaggggcatcaggggacagagcagcctgtccccacacctcttaccccctggggactgggcctgccccagcctgttaggaagccctggcctggcctgccgagggccccatccccctcccaggacccctggcttgcagccaggtggtggggagaggggcccaggtgggtggtgtgtgtggcaggtgagtgatgggcccagcaaggctggctcaggcccggagtcaccagggggcttagcagagactcttcaggccccccacaccttccccaccctatgcccctccacccttctacctgggcctgggggagccatcacaggcacctctgcatgtccactgtacagatggggaaaccgaggcttagatagcacctgggagtcaccaccaccctgcaccaccaggtcccccatggcattctccagagagcagcaatttcccccaacactagaatgttccagatatcctcacttacagtcagaagccacctgcagcccctaagtggtggagcagggctctatgggggacttgcctgactttggagttcttgaccctgagatcttcagaaaaccgactttcacctctggcagctgtgtggccttggatgagttcctcaacttctctgggcgtcagccacctcctctgtagagtggagccactgccggcaccttcttcaggaggttgaggtgacctggaaggtcacgctgatcctcccaccgccccacagggtctctgcgtaccccctctacaggctggaatgtttggcctgggtccctggccctctgcgggcctcggtttcccctcctgtaatacttgtaagaactcagcctctccctgctcatctacatggtgctggggccactaaacagacagggagtgcgggaagccccaggtgacggtgacagaaacctggcaccccctagaaacctgaccctggcctcacccccgggtcccctggcaccaacacgctgaggtctgcccacccctggtacccaggcccagctgggttcatgcagcttaaatttcagcctgtggtgggtgaagaggcgggggctggacacgcttcattttccaatttctagaaataaaagctgtggggccatctattgtggagtggaaataaagcccattgcaaaaccttgtgtgtgaaaaaataacaatagcatttacctccctgcccggggagagaaaattccagggaatacatggggccggggaacaaagaggcctttctctcattctggaaaggttttgtgaagtgtgcgagtggcaattttagaatcagaaaagctaatggaggtattttctttctttctttctttctgagactgagtcttgctccatcgcccaggctggagtgctgtggtgcgatctcgactcactgcaacctcccactaccgagttcaagcaattctcatgcctcagcctcccgagtagctgggattacagatgcccgccaccacgcccagctaaattttgtattttaagtagagatggtgtttcactatgttggccaggctgttctcgaactccggacctcaagtgatctgcccgcctcggcatcccaaagtgctgagattacaggcgtgagccaccacacccggcccaatgaaggtatttccgagaacgaaaacggttaggaggtggtctgttggaacctggaggtgaaaagtataattttctttcctttttttttttttttccagacggagtctccctctgtcgcctgcccaggctggagtgcagtggcacaatctcagcccactgcaacctccgcctcctgggttcaagtgattctcctgtctcagcctcccgagtagctggaattacaggcacgcgccacgacgcctagctaattttttgtatttttagtagagatggggtttcaccgtgttagccaggatggtctcaatctcctgacctcgtgatcagtctgtcttggcctcccaaagtgctaggattacagcagtgagccaccgcaccgggccaaaaagcataattttcttggtttgttttcaggcgatgttttcaaggtttctaagcacctgtctctccatcggcaaaaattacagccagtagagccagcgacctgggcacctgggccagccctgcagggagtgtatggagatgccactcaccttgggaagatgcaccaggagttacggtccactctgtccctgttggcgttctctgaagagtagaaattttcccctacccagactctgagaatgttccaaagacctcaatttatatttggtatccacctgcagccactcagtccctcagcccagctgtagcctctggtcactccccctcccagagggagacagtgttgagatttgacttcagaacaagggcagagccttacaaaaaatgagctgggcatggtggtgggtgcctgtaatcccagctactcatgaggatgaggcaggagaatcacctgaacccaggaggtggaggttggaggtggaggttgcagtaagatgagatcacgccactgctctccagtctgggcgacggagcaaaactctgtctcactca[134 bp omitted]cagtgaaaccctgtctctactcaaaatagaaaaattagctgggcgggatggtgagcgcctgtaatcccagctacttgggaggctgaggctcaagaattgcacgaacctgggaggcggaggttgcagtgagctgagatcgcgccactgcactacagcctgggcaagagactccgtctcaaaaaaaaaaaaaaaaaaaaaattggtgaggcgcggtggctcaggcctataatcccagcactttgggaggtcaaggtggggggacttcctgaagttgggagtttgagaccagttgaggtctttggaacattctgagactccgggtagggaaaaatttctatcctccagggtactccaacagggagggagaggactgcaaattctggcgcatctcttcccaaggtggcgtctccatacactccccgcaacatggagaaaccctctctctactaaaaatacaaaattagccgggcgtggtggtgcacgcctgtaatcccagctactcaggagactgaggcaggagaatcacttgaacccgggaggtggaggttgtggtgagccgagattgtgccattgcactccagcctgggcaacaagagtgaaattccgtctcaaaaaaaaaaaagatcttgtttatttcttggtttgtcagtgtcttccccagattgggcggctcatggggcagggcttgggtccccagtatgacctggcacccagtaggcactcagtaaacaggtgctgaataaatgtccttgtctgtgatggaagcttgaactcccacttggagaattataaacgaagactgaagatctttggactctggggcaggagtgaccctccccctgccccttccccaccccccaccgaccaccccagagattacagcctgcctcaggggaatctgcaggtgaggtagtcctcacccccagtgacacagggcaggacctcgcagggctggagatggaggaggccgggtggcaggcacaggcaggcaaagaatgctgccgcagacgagaatgaataaacaggctccttggatgtcagaggctgggggtggggggacactttgaacctcacgcctggctggggatgtttggacaaggcaggcggccagcgggtgtcatcagggctaaaattaacctccacttcccgctcagcccctccccctgggccaggagggaggctggggccccggccatcacttaagtgagcgctgtatgccggacaaagctccttgaagaaatcaatgcacgtggtcctctcaacaaccccgacagctgctatcagtaatggcattgtgatttatccccattttgcaggtgaggaaaccaaggcaccgagaaaaagggaggctgatagccacaaaactcaaaagcagcagagtcaggactcgaacctgggattcagggagtgtgttctcacctggaggtctccctgaaagccaggggagatgaaagagaccctgagcgatgagtccttggcggaggcgggcatgcggcccctcattcactctcccctagggacctctccagaggtttccagagttacagtaactttgggtctttttgtgcaaattccaagagatgcctgctgtgccagtgacctgctggggacctaaaacaccctcattgagccagggaagggtcaaggagggggcggggacagggctggtgggctgtggaaacctcgtgcagatggtgagatattaaaatacatccactccacaaaaattagctgggcgtggtgacgtgcatctgtaatcccagctactcaggaggctgaggtagaag[146 bp omitted]catgcctataatcccagcactttgggaggctgaggcatgagaatcgcttgaacctgggaggtggaggttgcagtgagccaggatcgcgccaccggactccagcatgggcaacagaacaaaactccatctcaaaaaaaaaaaaaaaaaaaaggaatgaatgatgctgtaagtatatcccaagaattgcatgggatatacttacgccaagccgtgattcatgatctatctgaaatccaaacttaactggatgtcttggatttttatttgctaactctgatgacttcagctgggtgggggtggggggcagtccctgtagcgggcaggtgctaagagcaaaggcaggcattaaggaggtgaaatcagagccacaccaggcgctcaggtggcttccaggacgcgacgccttcctaatgggcttcccaggtgcctccgggaccagccagatggaggaggcttcggggcctccctggccctcacccgctgggccagcccctcatcaccacctcccaggtccctcctgccaggctcattattcatctttaacggtcactcggcagggggagtgtgggctgggaacacctgggactcccaggcttgcagtgggcggcctcactaatgggggtgaggcccccattagagaggcagtaatgggtgggaaaggggtcccggcccaccaaggagctggcctggggcaggaagcatccaatttggggcaggggcgggaaacagacttctgccacccccaccctgccatttcctttcctgtcgaggcaggagtccagggaagcacctctggatgccttcacccttcccaatctccacctggacggggtcctgctgggccccccagacgcagagggggctgctctggcactcctgcctccccatatccaggcaggggtaggatggatgccccagccttgaccttccagcttcccatctgccagacttgctcaagagagtggctcacggctaaggagtggaaactgacacccagagaaggatctagaacctcgtactcttccatgctcttagccactcccctttctgtctctcctctgagctatcacacatgttgttcctctctcttgggcactctagcctggatgacaaagggggatcctgtctcttaaaaaacaaacaaacagacaaggctgggtgcggtgactaacatctgtaatcccagcactttgggaggccaaggcgggcagatcacgaggtcaagagatcgagaccatcctggccaaactggaaaaaccccatctctactaaaaatacaaaaattaactgggtgtgatggcacacacctgtagtcccagctactcaggaggtggaggttgcagtgagccgagatcacgccattgcactccggcctggtcaacagagtgagattctgcctca[132 bp omitted]caacatggagaaacaccatctctactaaaaaatacaaaattagccaggcatggtggcgcatgcctgtaatcccagctactcacgagtctgaggcaggagaatcgcttgaacccaggaggcagaggttgcggtgagctgagatcgcaccattgcactccagcctgggcgacaagaatgaaactctgtctcaaaaaagaaaaaaaaaaaaagaaaaaaaatgtccctacacccctattagaatggccaaatccaaagccctgccaacagcaaccccaaatgccccgaacccctgaggacagggagcaacagggagtgtcattcattgccggtgagaatgcagaatggtacagccgctttggaacagtttggcagtttcttataaaactaaacatactcttaggatgagacctagaaatggtactcctaggtatttacccaaaggagctgaaaacctaacatccacacaaaaacctgcacacagatgtttacagcagcattattcacagttgccaagattgggaagcagccaagatgtccttcagcaggagaatgggtaagaacactgtggtgtgctcagatgacaaaattttattcaggctgggcacggtggctcacggctgtaatcctagcactttgggaggcaggggcgggcagattacctaaggtcaggagttcgagaccagcctggtcaacatggggaaaccctgtctctactaaaaatacaaaaattagctgggcgtggcggcacgaacctgtagtcccagctattcaggaggcaggagaatctcttgaacccaagcagacattgcagtgagctgagatcgcgccactgcactccagcctgggtgaaagaggaagactccatctatatctatatctatatatctatatctatatctatataaaatataaaattcagtgctaaaaagaaatgagctgtcaagccatgaaaagacacagaggaaccttaaatgcattttttttttgagacggagtttcgctcttgttgcccaggctggagtgcagtggcacaatcttggctcactgcaaactctcccccactccctgggttcaagcgattctcctgcctcaacctcctgagtagctgagataacaggcgctggccaccacacctggctaatttttgtatatttagtagagatggggttttatcatcttggccaggctggtctcaaactcctgacttcaggcctccctccgcctgccaaggtgctgggattacaggcgtgagccaacacgcccagcccttcaatgcatattactgagtgaaagaagcccatttgaaaaggtgacacactgtatgattctagctacagaatattcccgaaagaggaaaactatggagacggtgaaaaggtcagtggctgtcaggggctgggggaggaagggacgaacaggcagagcacagtggatttttagggtagtgaaactactctgcatgatactgttaaatggtagacatatgtcattacacattcatccaaacccacagaacatatgcatacaacaccaagagtgaaccctcatgtcaactatgaactttttttttttttttagatggagttttgctctgtcgcccaggctggagtgcaatggcctgatctcagctcactgcaacctccacctcccaggttcaagtgattcttctgtttcagcctcccaagtagctgggattacaggcatgcgccaccatgcccggctaattttttgtatttttagtagagatggggtttcaccac[306 bp omitted]aggcaggacgatggtgtgaacagggaaggcggagcttgcagtgagccaagattgtgccactgcactccagcctgggtgacagagtgagactccgtctcaaaaaaaaaaaaaaaaatttcttcattgctgcccggtgtatagtagcagaagactggaggccaggacatgtgctttcaccagaacaatggtccagcctcaagatggaatattacactgtccttacaaaagagggggaagttctgcactcgaagaaaagatccgagatgcattgttaggagtcaactacgctgagctgcaagaaagtacggggagtgtgatgttgtttccgtggggaaaagaaaatatacagacatgcttgttttggcgtggaacatggctggaaggagaaacaagaaaccgactaatggcctctggggatggcgtggggcttggggagtggctggtatttattctaaacaccctctagaatcttttgaattctatggcatgcgtctgtcttacctctaaaagaaggaggataaactgt[213 bp omitted]aag[139 bp omitted]gactttggatgggtttgaaaaggctggggtggcaggggtggtggctctagatttcaggccaggccatcgctctgcctgctgcccctcagtttgggctgaatcccccaccaggccccccaacgaggccccccagagccctgctcttgtcctggctcacacctttcctactctggttcagcgagggttcagaccagtggggacccctggaaggtgagatgtgggctgggctggggccagggacagggccaggcctgccggagccccttgcagctcggcccgaccacccagctttccaggaagcccgaggggaggcttggctggctcagaggaaggacctgtgtgcgccaatggtggggctgggggccaaaccaggcccctctgagcgcccacgctctgaggaggaccacagcaagtggagggaggctggctagaaaagagatacacagggaggaaggcccgagcttccctatgcctcagtttccccataggccaaatggctcgctggctgtgtggcccttgtggacacaggggatgcctgagatgatgtgggaccagggaactatggctccactgggtcctagccttggacgccaagccagataggataagggggggcaagtcccgccctgacttctggagccctgaagtaatgactaacccggctttaggctttaaggctggggcctcctaccagaacacagccaggagagagtcacgtcctctttcctaagatctctacccctgtctactccctcttcctccctctgtgctctgctggggaccctgtgggtacagggatgtggcacccccaaggcattcagggctctgggcctctctttttttagagacagggtctcgctctgtcacccaggctggagtgcggtggcaggatcatagcttactgcagcctcgaactcctgggctcaagcgattctcctaccttagcctcctaagtagctgggactacaggtgtgtaccaccatgcctggctccagccccctttttggctcttttgggggtaccctagtgggccagtgttggtcccaggggtctttgtcaggacaagggaaatgtttggcccagaagtgcctgtctatggtttaagcaagatctgcagctggccacagtgactcccgcctgtaatcccagcactttgggaggctgaagcaggagggtcacttgaggccgggagttcaagaccagcctggacaacacagtgagactccatctctacaaaaaatttagaaattagccaggtgtgttggtgcatgcctgtagtcccagcttcttggaagctgaggcagaagaatcgtttgagcccaggagtttgaggttgcagtaagctatgatctcaccactgcactccaatctgggcaacagggcaagaccttgtcttcttcttattttttgagatggagttttgctcttgtcactcaggctggagtgcagtggctcgatctcagctcactgcaacctccacctcctgggttcaagtgtttctcctgccttagtctcctgagtagctggtattacaggctcacaccacgatgcctagctgattttcatttatttatttatttattttgtttatttttttttggagatggagtcttgctctatcactcaggctggagtgcagtgacgcaatctcggctcactgcaacctccgcctctcaggttcaagcgattctcatgtctcagcctcccaagtagctgggattacaggcacctgccaccacgcctaatttttgcatttttagtagagaccgggttttgccatgttggccaggctggtctcgaactcctggcctcaagtgatctgccaatctcagcctcccaaagtgctgagattacaggtgtcagccactgcgcctggctaagaccctgtctttctttttctttctcttttttttttgagatggagtctcactctgtggcccaggctggagcgcagtggcgcgatctcggctcactgcaagctccgcctcccaggttcacgccattctctcgcctcagcctcccgagcagctggaactacaggcgcccgccaccacaccc[137 bp omitted]cccggccaagaccctttcttaaaaaaaaaaaaaaaaaatacacacacacacacacagtagttgcttcatgatgggtgtatgtttggagaaattcgtcattagatgattttgtcatgcacaaacatcccagcgtacacacgcctagatggtagaacgtactgcacaccaggcttcatggtactgtctactgctcccaggctataaacctgcagagcatgtgactgtacagaatactgtgggcaactgtaacatgatgacaaatatttgtctctaaacatccacaaacagaaaaggtacaataaaaatatggtataaaatcttatgggagccgggtgcggtggctcacacttgtattcccagcactttgggaggccgaggcgggcagatcacttaaggtcaggagtttgagaccagcctggccaacttgatgaaaccccatctctactacaaatacaaaagaattaggcggatgtggtggcgggagcctgtaatcccagctactcgggaggctgaggcagagaattgcttgaacccaggaggtggaggttgcagtgagccgagatctccccactgcactccaacctgagtgacagagtgaa[136 bp omitted]ccggtctctactaaaaatacaaaaaaattagccgggcgtggcagtgggcgcctgtagtcccagctactcaggaggctgaggcaggagaatggcgtcaacctgggaggcggagcttgcagtgagccactgcactccagcctgggtgacaatgtgagagagcaagactctgtctcaaaaaaccaaactaaacaaaaaaaaagaaaagaaaaaaaaagaaacaaaaacaaaaacaaaaaacaacaaattaactgagtgtggtggtgggcacctgtaatcccagatactcgggaggctgaggctggagaatcgcttgaacccctaggcggcagagactcagtgtcaaaaaaaaaaaaaaaaaaaaagtctcatgggactcccttcacatatgtggtccgtcagtgaccgaaatgctgttatactgcacatgactgtttgctgaatgaactctgagtcttgcccccgggtctggagggcttctcttcccgtgccttcccgcactccactgcagccatcatctcatgtggggagagtgagaaggaccctgatccccctccgagagcctataccacccaggcagcaaagcagggccaggcagggtgcacagccacccccaagtggttctcaggccccacctctggacctcctaccctttgcagacctggagattcattcatttgtttatccattcattcattccacacatagttctggagccctgctgcgttcctcggctgggtgccggggtgtaggcagaggatataacagccaggatacgtcccagtcctcaaggaggtgcacataaataacacacgtgatggtgacgtgggacttagaaactggcaggggctacgggcaaaactagaaggcaaatgagtgtggagtgctggtggcctggggacgggggatgaggaggtggcttgtgagctgagaattgaaggaggtgaggggtgagcttggggacatctaggggacaggcattgcaggcagagggtatggactatgcaaaggccctagggcaggactgtgccaggggttttggaggaagagtgaggaggctggtggggctggagcagtgaagaggggaggggaggagagggaggggagggagaggaggggtcgggacacacagggcatagtgggctgtagagaggatttgggcttttcccccaagtggggtgggagccatggaggactgtgggcaggggaggggcgggacctgacttaggggctcacaggcgccttctggctcagggggtagccgggtgaccagggcagaggggactacgcttgtcgtgatgatggaatcagactagaggcagatctgggacagattctgaaggcaaaggggctcgagatgcggggagggcgggagcagctcttcagtcccaggaggggcacacatcagccccgtggggtcttctcagctgtgtcccaccccaatcatgtcaaacacatttataggagcccacagcccacactcaacacaagtttaaaggagtacagttgtgctcaagttggcagcgaaaacaccttcctttctcagtgaggtattttctttttttttttttttgagacggagtctcactctgtcgcccaagctggagtgcagtggcgtgatcttggctcactgcaagctccgcctcccgggttcacgccattctcgtgcctcagcctcccgagtagctgggactacagacgcccgccaccatgccagactgtttttgtattcttagtagagacagg[148 bp omitted]aagtcttaaaggaacaaattgccattttccaaacaatagctattcttaggagaagtaacacttcttttagctactgccaggccctgggaagtcacctcccgggcctcagtttcctcatctgtaaaataggactaatgcctaacagagctcacgcacggctgcgcagactaaaatgagccaaaaataataataacaactgcacctgcctggcaggtgggaaaagcttgatgttccccacccccaccccccttttttttgtcttgtgaatgttttcttggctcacccaagagcttagagacccccggcggcggggcctgggtcagcgccagcccaggccagcgttatttatttatttatttttgatacaaagtctcgctcactgtctcccaggctggagtacagtgacatgatctcggctcactgcaacctccacctcccaggttcaagggattctcatgcctcagcctcccaagtagctgggattacaggtgcctgccaccacacctggcttatttttgtatagtagagacagggtttcactgtgttggccagggtggtctgaaactcctgacctcaagtgatcccccagcctcggcctcccaaagtactgggattacaggcctgagccacggcgcagggccaggccggtgttcttggagccttgtctctgctggggatgtgtctccagggatggattctcgggaagcaagtgtgtgccctgcagcccccaggcacctctcctggaccaggaggcccctgatcgcccactgctctccctcacagcaggcctctgctgttgctgtgtgctctgcctggaccagcctcccgctgggtacacatggaaaagcctcttcatccttgggccctctctgctgtgccgcctcctcctctaggaagccctcctagctccccagggaggctctgcccctcctcagttccagccctgactgcctggggctgggaagggctccatgaagttcaaggtaaactcaggaagggtcccccacagcccctcagggagcctgctgggaccgatgttccagacgggggccctcttgtgtgtggggtgggagtgacgtcagccctccacaacctagtaaatgtttatgggccggggggcctcggctttggggttccctggagcccagcaagagaccaccccctcgtgttccattctggggggcccgtcctgcaggcgaggtgggggcgcctggcaggcctgcgccaaccctggcggctagcccggaatgggctgggtgggcggcgagcacagctcctggtctgagccgtcggctcccttgaacacagggaggcacctggggctgggaggtgcgaaggggcgtgcggcctttaaatttcaagctccactacccagggtgggcctcagcgcgcgcatccgtggaagagggctaagagatctggtacagggtttgggccgcacacgggcctggagggccggggaagggcttgcagggggcggaggcctgcgtggaaccagtcccagaagcggccatggtgcagggctgagggtgaccgtcgtggggacgtggactagtctttcctcctgtccagccttcggtgtccttggctggaggtttggggctgtattgcccattcctagaagccatcacttcccggctgcggtgggcaggatgcatgggaaggaagggggatgagggacagacaaggcctggagtgcggaggaagggatggaatctgacgcctgtggtcaccgcggggctgggggcctggggatgaccgcccgggtccacactgcccagcaggccgtgctgtggtgggcgctgccccctgccggccgcagtagagacagaggccggtgccctcgagtggatgcgatgcccgtgagtggatgggatgcctgcagggaggtggaatcgtctttctttgtggggcatctctgaggggcccttattcccatttaccaggtgggaaagctgaggcctgggtgctgccgtcctctgaggacagaacaaggaaagaatcaagttctggggttcgaacccagagtgtttaacaatgactctattagggcttggacaggtgtcagggcccctgcccctctgggtgcggggtgggtgtgtccgccctttctcagggagcccgaggcccgggcacccagctccggaagtggacgtgaccctgagctgttgcatgccccccttgtgctggaacacgcgtggacatctgtgctctctccagagaggacttcgaggcaggcgctggaagaagggacccagaatctctgtacacagtggctcatgcctataatcccagcactctgggaggctgaggtgtgaggactgctcgaggccaggagtttgagaccagcctgcacaacacagtgagatcctgtctctacaaaaaataaaaataaaaacaattagctggctgtagtggtgcacacctgcagtcccagctaccagggaggctgagatgagagagtcgcataagccaggaaggtcaaggttccagtgagccatgatcctgccactgccctccagcttgagagacagagcaagactatgtctcaaaaagacgaatttttggtagagacagggtctcactgcgttgcccaggctggttccaagctcctggcctcaagcaatcctcccacctcaacctccaaaagtgctgagattacaggctcaaaccaccaggcccagcctacaacattttttaaaaaaattaaccaggcatagtggcggtggccatagtcctggctactcgggaggctgaggtgggaggattgcttgggcccgggagttccaggctgagttactactcgggggtggacagagaaggatatgaggctgaaagtgaagtttggcttttcacatctaggccccgcggatgggcttgagaaaagggaagagatggggccggatacgggtcaggagggccatagccagccctgccggttcctgctgtccccggcccaccagcagggcccagatccatcccagccagggctgtgcacagctccgctcccctgggtggagcctggagcgccctaatttgcagcccaccgcagcatgtgggagcttgcaggcttcctctccagctgccagggagcatgagccagttctggagaaggggcccggggtggtgccagcattccagggccacctaaatcactggcctgacaggtggcaggaagggatcgcaattctttcccttgtcgctgccaccagccaggtgctgaggggggtcctgtcccgctctgccctagccccaggggctgcgagtgacctgccggatggggacggctgctggaccagcctgtccggggctctccgctccagtgcccaggaatttggagacagggcctgggcgtgttttccacatgttgttggctttggggacaggcccagagaaaggatggctcaagatctgcaggggggttgtgaccagagcccacagcgctgagggaagggctgtgggcggcagggcccattttccacttgctggcaggtcactggcacgctcctgccctgccctgggaactgggggaagcagaggctggggcgcatcccagccgtctcccctcctgggctcccgatggccccagcctgatgcactaccagttctgtggggccaggctggtacccttggcagggacggcaggcggcaggcaggcgcgtgtgcagggggccttatcttatctcccttcctcactccctcccagatccgccctcaccggctgctgtgtcgccgtcatcaagccctccggacactgacacacacacagacacagaatttatttctggacgcattctgcaggctggaggtcccggcaggcacagggctcacaccttgggttttgcaaacacctcccagccctccagccggcccatcttgaccagggaggccgctatgccaaagtacacgcaggcggcggcgccaatcccgtagttgtgcgctgtgggagtggggaggtgatgtcaggcccgggtggggctcggccggaccaagacgctccacgccctggccggtgcccaccctgggagccagactgagacccctgacaggacactctcttcagggattaagtcactcaggaagagggccctagactctggagatgtggaaactgatgcacagagggaggccggagtccaggttgcttcccagcaggaacccaggctgtgggtcctcatcccgccccacactgacttccccctgcgaggacaccgtgctgcccccagctggggctggggcaaggctgggcaccgggccatggtgacacatcggtgtgtctcagtctctcctttgcccatggatgccagggccaggccacgcatctgtcccgtggtctgtgtaccgaggagccccgacagtgcccccacttctccaggctctcctgctccgaagcctccgggccagaggaggaaggaggtgtgtccccacacaccaggacctaaagggactcacactctttgaagagagacagggaggctggcttggggacagggagcagttccagcctgagctgggctacagtcaagacctcaacccacctgcaacctctgaccagttccagtgggagctggggagggacaaggcctccccaaggtcttgacgcagagacagcagtgacggcgtacgccctgccctcgcaccctccctctctgcctgcctggaacctgccattcatcactcccaacatgccaggccagagcggctgagctgcaagagggctcgttcactcctcccgctggccctgagggcccgagccttggcgggctgggggtaggccaggggcacaggcgggcactgacgctgagcccgggcccatgggagggcaggagtgatgtctggctcatgctccagacgggctcccctgtgccaagcgtggccttctccaccagggctgcaccctctgatggctgcaaagaaggccacttgctcctccaggtgacctcgggccacttaattccctccctgagccctaatacccttttctgtaaagtgaaggttgcgggggcagctcccctgcagggctccaggtgcagggagagagatggcagggcgagactccatccatcctcctctctgactcacaggccagtggcagagacagggggtgaccttggtgacctgtgtcctctgacaaggcacacagaaggaaggcggcacagagcgagggcggcggggatgctggcttgtacacagggtggtcaggacagtgaggggaacagcattccacgcagtgcactgcccatgcaaaggccctggggcaggactgtacctggcatgtgggaggagcagtgaggaggcccgtgtggctggagcagagtgaggaggggagggtggggaggggacagggcaggtcagggagggccacagtaggtgcttaagcagcagcagcagctgtcgctatgactgaaatggctggtgttcaagaaggctgctttacttcttgtccgggatggaacagagagggtggaggatgagcagaggtcaggggtcattctgccaggctgggaggagggtgggggtggggagggggccactcactgcgtgctcccagagtcaggcctccggcgcagccaccgaggaagtagttcagggggtcgtcgggcttctcgcggacatgggcgctgatgcaggtggtgaggccaaacacggccccgacagcagctgcggggtagacgggaagagcaagggcctcgagacgggcacagcaggagcctcttgggcgctcactgccagtgtctggatggagagagatgccacgagtcggctgctcgctgtgcatggcagcctcctggccccagtcctggagctgttctcctgggcctccccaccctacatgtattcctgataaaggaacaccccactttctccggatggccagcactgtggacacgggctggggagtcagagagaagaggcagccgtcaaatgtgctctgagagctggggctgtgccaggagagggcccagccatgcccagcccagcgtgctcacctgcagtgaacgtgtattgtccaaccttagccactccttcaaggaaggtgcccggaggattgagtgtgactctgtaggcagcggcggtcaggcctgcgagacagaggagggaggctgttcagaccccactgctgctaagcccttgcttggccgggcaccccactgggtggtctccctccctcagtcctcacgatgccccccttctttgcccatagtgtccccggctgctgagtggcagagctggatttgaactcgggtttgctgctccaaaactggggggcctctcacttccttccccactccccgccaggccttccttggccactttctcaagcctgaccagtactggctcctgcagagcacctgctgggcgcccatcagccatgctggccctggcagggcaccggccggcagacggagactcatccacgtggtggacacaagaacaggcctgagacctcagttctgcggctgcttccagcctcacaccgccagctcagcggcgccccccacgggccctggcaccagggccccagctccaggttcccatcaatggctctattctcctgtggggcccggggctcctgggcctaatcccccttggcagtggctctgcttccctgcctggctgccaacgcctcctccttgccactctcgaccccctcctgctggcagctcgggcctgggctcgtcctgcacacctggctgtctggctgccgcccccgccacccagcctcgccactccggtcagcttttccatctctgccatttcccaggccgcctggcccctgacattggcttctatgcatgaggagcttgggccggggccgggcccagaactcagggccaggtaggtggtggggacggaggtttgatcccagcccaccgtccctgctgggtgcctaggggcgtcctgagtgaggctgggcagtcccttgggccacgtcctcccagagcccgcccagcttcaccagcccctctatggtggatgggcagattgagccagcccgagccggggctccccaatcctctgcctgactgctcagggcaaacaagcacccccctctccctacagcctcgaaacatagcccagttgcaggcagggacctcctcgggccagcccatcccagagaaaacagaactgccagggatgggccacaagggccctcatccttctcggggcccgatgggctcagtcccgttatcccctccttcacgggaggtgaagggacctccgagatgtaaagcaattctccagaggtcacccagcacagcgagcctggacgccaggcaggtctgaccacagcctatgcttcacccaccacgactgccccaggggagtgggctccaccccagttccccatccagcttcaagggacccatgggacatgccaggcctggcagtgaccccccccaacagcaccctagcctcagatccaattcagctcatgttggttctgtccctcaagagcgactgaggggactctcacatccagcagtggggtgagcacatattcagagcagcccataggagggaccatctgctccccacaagcacagatggggaaactgagacccaggatgcagagaaagggaccacatataaagagtaccttgtggatctggtttctcctaatcctacaccaacccctgggattcctgctcgacctcagaaaggtggatggaggaccaggcgcagtggctcacgcctgtaatcccagcactttaagaggccaaggtgggcggatcatttgaggttaggagtttgagaccagcctgaccgacatggtgaaatcccttctctactaaaaatacaaaaattagccaggcatggtggtacacatctgtagtcccagctacttgggaggctgagtcaggagaaccacttgaacccaggaagcggaggctgcagtgagccaagattgcgccactgcactccagcctgggggacagagtgagactccgtctcaaaataaaaaaaaaaaaaaaaaagaaagaaaggtggatggagcggagtgccaggtctgggggctgtggcaggaaagggggttgctactgcatccacggtaagggactggagtccagtacagccgtccccccaggactccccacctgctcctggcccagcagccccatcctcagtcacacttcagtcagtgcacacacacacacacacacatcccccccttccaaattcttttatgtatttactaattga[140 bp omitted]cctc[134 bp omitted]ggcctcccaaaagtgctgagattacaggcgtgagccaccgcgcccggactctttttttttttttttttttttttgagacagtcttgctctgttgcccaggctagagtgcagtggtgcaaacttggctcactgcaacctctgcctccttggttcaattttcccacctcagcctcctgagtagctgggattacaggcgcctgccaccatgcccagctaattattattattattattttttgtatttttagtagagacggggttttaccatgttggccaggctggtctcaaactcctgaccttaggtgatccacccacctcagcctcccaaagtgctgggattaaaggcctgagcaaccatgcccggacttgaagattcttaatgggaggggactgccagccctgcctgggacctgaaaagtcctgatccagggctgggccagccatgacagtcttataaccctctcatctcaagagggaaccaccgacaagactcagtgacgcccccagaactgtcaccgagggactcctgggcggaacctccttacaccacccccacatgccagctgtcctgaccaagggacccctagctcatggagcacacctgacacggtgagtgcgcccaccatcctccatcccttccaaagtccttgaactgggagtggacgagctgggaccccctgattatcccatagaggtcaaggactgccccaccccaactctgccccagctgtcatccagctgtggtgtcctgccatatccacccctccaggagcccccagcgcccttcaaaaggcccccttccctctgaagggaaactgctggtttcctctgagcctcccacagtgaccgccagacccagtgtgaattcattcattcattcagctactgccactcattcattcattcacaaagttaccgagtacctaacaaggtgccacattcactcattcattcactcacaaatggtgcccacaagatgcttcattcattcattcattcattcatccatagttatcatgtgcccacaggtcctgggctctgctgagtatagtctccccgccgtccagggtccccaactcagggaagccagccaggaaacaatttatctccctcagatgagaagtgaggggagccccggaatgaagtgagtggggcagtgaggggaggacccagaaacacgtttcagcaagttctgc[137 bp omitted]atggcgaaaccttgtctctactaaaaatacaaaaattagccaggcacggtggcaggcacctgtaatcccagctacttgggaggctgagacacaagaattgctgggaggcagaggttgcagtaagccaagatcgcaccactgcactccagcctgggtgacagaatgagactccgtctcaaaaaaaaaaaaaaaaagaaaaaagaaaaaagaaaaatttagggagaatgaatgtcactctcaaagaccccggggcacccttggagggctcacagaagccactgagcacccctaaatctaaatctgatgccatcagcgatctcctgacatggcaactctgtcaaaagttctgacctccccttctaagaccctctggggagcacccccggtctcagaggcccttcactcagcagcaccacaccccgagacaagctgtctcctccaaaggcctcctgagaccgcagcccactcattttgtattcacacatgaggaatgcacacactctctcacatgaacaccaacatacgcgtctttctcagtttcagatcctatcccctgggtggcccccttcagccctttctcttgaagaccctcgataaggacctgatgggaacattccttgcttcagagacccctaggagcaggtcagccgacctggacttgcagcccagcttcaaatgaccctggagcagttaatatgcttctccaaccttcagtccctacctgtaagaaatggagacacaataacgtctgtcttactattaataaatatgcaaaatatgggagtgatgattaggtctgccctaattcaaatgcctcccaatggagccgcaactttggccgggccctgtttcacatatgctggaaatacagagttgaccaaattgattcctcagcttatagacacaccaggttgtaaagactgtttctttgggtttttttttttttttctttttgagacggagtcttgctctgtcgcccaggctggagtgcagaggcgcaatctcggctcactgcaagctccgcctcccaggttcacgccattctccttcctcagcctcctgagtatctgggactacaggtgtccaccacca[141 bp omitted]ggctggttttgttttgttttgttttttgagacagcgtctcactctgtcgcccaggctggagtgcagtggcacaatctcggctcactgcaacctctgcctcctggattcacgccattctcctgcctc[134 bp omitted]agtgctgggattacaggtgtgagccaccatgcccggcctattatttttattttttgagacaaggtctcgctctgtcgcccaggctggggtgcagtggtgcaaacatagctcactagagccttgaactcctggtttcaagtgatcctcttgtctcagcctcctgagtagctgggactacaggtacgcaccatcatgcccagctaattgttttacttttttgcagagatggggatcttgctattttgcccaggctggtctggaactcctggcctcaagcgatcctcccactttggcctcctgagcgccggattacaggtgtgagccaccgcgcctggcccagtttgtaaagattcttcatcagagggaagaggacttccagctccatctgggacctgatgagtcccaacctgtggctgagaattaaagggcatgatgcccatgaaacgctcaggctggaagg[222 bp omitted]gctgaggcaagggaattgctcgaaccagggacgtgaaggttgcagtgagccgagatctcgccactgcagtccagcccgggcgacagagcaaggctctgtctcaaaaaaaaaaaaaaaaaaggagaatgccagggcttgcgggtccccttcattcccctgcaaggctaccctcatagtagctcctgatccacctcacctaggacctctctggcggtcccagtaaaagcttcaggtgtccctaaccacccagcaccccctgaccacagaaagacctcatcccaccccaaaactttctcaaacatctgtaccgccctcagatgccccaatcatgactcatgatcccctctaacaatctctaccccgttggaaagtctcgtggtcccttagctccttggacctgataatagccctgtctcactccacaatttccccgagcctggcgatagcttgggaccgcctcagatgaccccagggactagcttgtcgcatgtcacgacctcccagtgctccccaaccctgctggaccccctaccaacatccatttcacacaagatccccccctacgaccgcccaagacaccccgatgacaaccacgtgcgtacccgcgagactcccagacccgttcgatccaaacagcccccagtaaccccacgacctccctgcggcctcggccctccaccctcggggcccggccggcgctcaccagcgacgctggcaatactggtggtgctgtaggctttgcggtggcaatcggtgccatcggggatatcccagtactgacgaaaaaccttcggcgccatagcccgcaatctcgatcccgcaccacggaccccgccagctcgggaagcgcaagggcagccgcggctggctatcgcgagacttctcgggctgcgcgcgcaacctttcgggctagcgggccggcaacaagtgagcaactttattgataggcgcggacatggacatggatcgcgcgcacgcgccggggaccggcctggaggaagagagtagcacgtgcatccccaggccgattcctagagggtgaaactgaggacgactgcgatcagtgcagacagatttcgctagtcccagctcagggagtcctaggttagggactactagaggcggggactatctactaggggaggggccgggctcagactgggacgggcgggactccagttgataggagcaagacatgacgaaacaatgactggggggcggggcatggcggggatgtggccacacccagtgtcagaatctgcatagcgagtggtcatgccctgtggtcagtcaccaagctggagtctgagcagcgtgctactgttttgggccgtggacaggatcaggggcggggattatcgggaaagtgaccaatgacaatacgagaagctcagcgggacgtggcctctgttcaccccgcggctgtcccacgccctaggccggatgaagtacacaggcgcttgacttgggggcgtggctagaattggaggcataacctaaaagggacttgaccaatctgagactgtataagggatgaaggggcgaggccgtgcctggatctacccctgacaggccacaggttcggggggcgtggtcaggcttgctgtttcgcggagtccgggccaatcctggtgttagcttccaagtagggaggggacagtatcgaaggtgtgaccaatcttgtttccagagcctgagttgcgcgagccgccaaaggatgtggccagcctgggggcgtggctgtcaagatcttgtccaatcctagagtgagcccaaactcaggggcggagtttcatgatcccggaaccggtggtagtgtttgggtttgaggagagcacgacccagccctctggggtggggtctagcggggtcagcgaccaatcgcgccgaggtctagtggggcggggccctcccgggggcggggcctgtgccagttccgggccgcctgggggcgtggccgggcctgtacagcagcctgggccatgtcggcgccgccggccctgcagatccgggaggcaaacgcacacctggcagccgtgcaccggcgcgcagcggagctggaggcgcggctggacgcggcggagcgcacggtgcacgcccaagccgagcgcctggccctccacgaccagcagctgcgcgccgccctagacgaactgggtcgcgccaaggaccggtgaggcccggggccggccaggtggacttcaccgaggcggtaggcggaggcagagccgaggctggaaagcgaggaagggcagggggaaccgtgtgcacttgtatagacgctagactgagtatcggattgataaaaacaccaaaaaactcgaattagtaatcagtatgtaaagttgcgagaagtgacacaggtgtggacctctaacttcaaacaggcccactttcccacaggtgctgagcgacgcagggaccacagaccgcccagcgtaggcattgggagccatagcaggctcttcagcaggggaggaggggatcatatcagcattttaacttttaaaatttattattatttttttgagacggagtttcgctcttgtcgcctaggctggagtgcagtggcgtgatctcagctcactgcaacctccacctcccagattcaagcgattctcctgcctcagcctcccgtgtagctgggattacaggcgcccgccaccacgcccggtcgattttttgtatttctagtagagactggttttcgtcacgttgtgcaggctggtctctaactcctgacctcaggtgatccgcccgcctcagcctcctaaaagtgctgggattacaggggtgagccaccgcacccggcctaaatttattatttttgaggcagggcctcactcctatgcccaggctggagtgcacctcgacctccggagctcaggtgattctcccacctcagtctcccaagcagctgggactacaggcgtccaccaccacgcatggcttattttttgtatttttttgtagagacagttttgccctgttgcccagtttggtcttgaactcctgggctcaagcagtcctcccacctcacccttccaaagtgctgggattacaggctaagccaccatgcctatctattatttttgagagagggtcttgctctgttgcccaggctggaatgcagtggtgcgatctcgactcactgcagtctcaccctccctcctcagcctctcaagtagctgggattacaggcgtgcgacagcacacctggctgatttaaaaaaaaaaatcctttagaaatggggtcagactatgttgcctaggctggccttgaactcctgggctcaagtgatcctcctgcctcagcctcccgaagtgctgggattataggcacgagccaccatgctggcccatatcagcattgttgaagagtccctctgacagctgaggatgaaagagatgagacaggcacccagggaggtgggaggagctgggtcccaggtgggaactattacttcagagctaattggacatattcatttttaccgagcacctgctctgtgccaggcactcattcattcgtcttcattgagcacctactgtgtgtcaggcattctgctgagtactggagcacatcagtaagacttagccttgcccattgggtatccacagtccagtggagagacagacatgtcactgggcagttacatcattggtggccagcggccatgatggaggggcatatggggctctgagggatctcagagtgaaggcttcccagaggaagagcctactaagaataggtgggaaaagataatggaaaggaacgaactgcaggaagagtg[132 bp omitted]gccaacatggcgaaaccctgtctctactaaaaatacaaaaaaattagctgggtgtggtggcacacgcctgtagtcccagctactcgggaggttgaggcacgagaatcgcttgaacccaggaggcggaagttgcagtgagccgaaattgtgccactgcactccagcctgggcaacagagagagactctgtctcaaacaaacaaaaaaacaaaatgccataaattaagtggcttaaacaagaggtttgtttctcagcgttctggaggctggacgtccgagagcagggtgccagcatggtcaggttatgggagggccctcttccgggcttgcagatttctggcttctctctgtgtcctcacagggcagagagagccagggagttcttttgtatctcttcatataagcacactaatcccatcatagagacccccaccctgacaacctcatctaaccctaatcacctccaaaaagctccatctctaaatacccttctgctatggttagactttgtgtttccacccaaatgtcagcttgaattgtaatcccataatgcccacgtggtgtggaaggaactggtgggaggtaaatgaatcatgggggatggtttccccttcatgctattctcatgatagtgagtgagttctcatgagatctgatggctgggcgcaatggctcacgcctatactctcagcactttgggaggccgaagcggtcagatcacctgaggtcaagaatttgagaccagcctggccaacatggtgaaaccctgtctctactaaaaaaaaaaaaaaaaaaaaaaaaaattagctgggcatggtggcacacgcctgcagtcccagctactggggaggctgaggaggcagaattgcttgaactcgggaggcggaggttgcagtgagccgagatcacaccactgcactccagcctggatgacagagctagattccgtctcaatcaataagggagatctgatggttttataagggattccccctttgctggtctctcactgtctctcctgctgccctataaagaggttccttccatcatgattgtaagtttcccgaggccacccccagccatgtggaaatgtgagtcaattacacctctttataaatcacccagtatcaggtatgtccttagagcatcgtgagaatggactaatacacctcccattggggttaggacttcatcatatgaattttggggagacagaaagatgcagttcaggctgggtacagtggctcagcctgtaatcccagtactttgggaggccaaggcgggtggatcacttgaggtcaggagtttaagaccagtctggccaacatggcaaaaccttgtctctactaaaaatacaaaaatcagtcaggcatggtggcgcatgcctgtaaacccagctactcgggaggttgaggaggacagtttgaacctgggaggcagaggttgcactgaactccagcc[131 bp omitted]ccagcatggtgaaaccccatctctactgaagatacaaaaaactagccgggcatagtggtgggcacctgtaatcccagctactagggaggctgaggcaggagaattgcttgaaccctggagccggaagttgcagtgagctgagattgcaccattgcactccagcctgggcgacagagctagacttcgtctcaaaaaaaaataataataaaataaaatataataataataataaaaacaaagaaacattctgttcataaccagggaggaccctgaggcagtggtgaggaatgcgggctttatcccaaaggtgatggggaacctcttgcgggtccagagcagggaggagcaggtgctgtggtcctcagttctgtaatcacctcctcttgccttcctgccagtgagattgccacactccaggagcagctgatgacctcagaagccactgtccacagcctgcaggccaccgtgcaccagagggacgagctcattaggcagttgcagccccgggctgagctgctgcaggacatctgccgccgccggccacccctggctgggctgctggatgccctggctgaggctgagcgcctggggcccctgccggccagtgaccccggccacccaccccccggtgggcctggtccaccccttgacaacagcactggggaagaggcggacagggaccacctccagcctgcagtgtttgggaccacagtgtgagcccggaatgcagattacagaatggagacagaaagccactgctgtcagtgtccttgggagtcaccagcaccctgcagggggaccctacggcagagccaaagtcctgtctaagcatcagaacaggctgaacagtcaaaaagttttcaaataggcccacaggccaggtgcagacgtttaacccagacagaagtgttcttgtttgtttttaagctttgaatcagtcacccttgctaaaaacctggcaatgcaaacacaaagatctggatttctggcaagacttggccaagcttgcctggagttcagggcaccctctttagccagggtgtgagtttctgttttttgtttttttttttttaagacagagtcccactctgtcgccctggctggggtgcagtggtgcgattttggctaactgcaacctccgcctcccaggttcaagcgattctcctgtctcatccttcagagtagctgggattacaggcgcccaccaccacacccggatattttatatttttggtagagaccggggaggggagggggtttcaccatgttgaccaggctggtctcaaactcctgaccttaggtgatccacccgcctcggccttcgaaagtgctgcagttataggtgtaagccaccgcgcccggccctagcctagcttttgtagcatgcaactgtctcctttttatacgccctaaagaatatatttttgaactccttgtttctgcgctgtccttcttagcccaggacattcagggtgctttgcttgttgtcaaaccagggaaaggagaaaactcctgtgcctttctgggccagcctgtcaccctggcctggtcggcagccattcccctacctcctcactcaggaactgtcacaccaggaaccggcgaggggcacagcctgtttcagaccagaaaggtcggaggccacccacggccttcaggatggcgcccgcctgcctgcctggcaacagtgacccctcagtgcagtaacaatgggcccattttctcctctggatgaacaaggaggggggttgtttgtacaaaggaaaggcaggctggggcctgtctgtgctcaagaataaaccggatgatttcctggcctgggggcaagagggaggccctctgtgttatttgtgcctcctggtagggtcctgctgggccaggtagaatctagggagtgtaggccaagcactctctacagcgattgcatctaatcttcgagtttccctgtagacacaggctttgtcctcattttacagctgtggaaagtgaggcccaggccgggcgcggtgtctcacgcctgtaatcccagcactttgggatgcgggtggatcacctgaggtcaggagttcgagaccaccctggccaacatggtgaaaccccgtctctactaaaaatactaaaattagccgggcttggtggcgggtgcctgtaatcccagctactgaacccgggaggcggaggttgcagtgagtggagattgcaccactgcactccagcctgggagacagagtgagactcagtctcaaagaaaacaacaacaacaacaacaacaacaacaacaacaacaaacagaggcccagaggtgtgaagggaacacactccgggtctggagggccagggccacttccaattctgggggaagttattgctgaaattctgttttctttctttctttcttttttttttaaagagacaaagtctcactgttgcccaggctggagtgcaatggtgtgatcacaactcactgcagcctcaaaatcctggtcttggctgggccagtggctcacacctataatctcagcactttgggaggccaaggcaggtggatcacctgaggccaggagttcaagaccagcctgaccaacatggtgaaactccgtctctactaaaaacacaaaaattaaccgggtgtggtggcgcgtgcctgtaatcccagatactcgggaggttgaggcaggagaatcacttgaacccgggagatggaggctgtagtgagccgagattgtaccactgcactccagcttgggcgacagagggagactccgtctcaaaaaaaaatcctgggatcaagctatcatgctacctcagcctgccaagtagctgggaccatgggcatatgccaccatgcctggctgcgtttttgcattttttctagagataaggtctcattacattgcccaggctggtcttgaactcctggcctcaagtgatcctcccgcattggcctcccaagaaattcttactaaacatttacaaatgagatgccaaaacagcacttcagtaatagtggttatattttatagttctctacacagaaaaaaaaatgctgcttgtaacactcatagacatgaaagtatttctctgcctatttaaataattctggattgcagtgagccaccaggattttggcagccagatgtcaccatgatttctcataaaactgatgatgttacatcagtggtggcctgaatcaagatgctgggatgcctgtaacctacagattggtttcagactccaaaggcaacttttttttttttttttttttgagacggagtctggctctgccaccctgccacccaggctgaagtacagtggtgtgatctaggctcactgcaacctctgcctccagggttcaagtgattctcctgccttggcctcctgagtagctgggattacaggcatgcaccaccatgcccagctatttattttttttagtagagatggggtttcaaaatgttggccaggctggtcttgaactcctgacctcaagtgatccgcccacctcagcctcccaaagtgctgggattacagctgtgagccaccgcgcccagccctggcctctttttttaagttatttatttatttttgagacagagtctcactctgtcgcccaggctgtggtgcagtggcatggtcttggttcactgcaacctctgcctcctgggttcaagtgattctcctgcctcagcctctggagtaggtgggattacaggcacccgccaccatacctggctaattttctttttttttttttgagacaaagtcttgctcttgtcccccagtctggagtgcaatggcacgatctcggctcactgcaacctccgcttcccaggttcatgcaattctcctgcctcagcctcccgagtagctgggattacaggcacataccaccacgcccagctagtttttcgtattttaagtagagacagggtttcaccatgttggccaggctggtctcaaactcctgacctcaggtgatctgtctgcctcggcctcccaaagtgctgtgattacaggcatgagccaccgcacccggctgactaatttttgtatttatagtagagacagg[147 bp omitted]taacccaggctggagtgcagtggtgcgatcatagctcactgcagcctccaactcccgggctcaagtgatcctcctgcctcagccttccaagtaggtgggattacaggaacacaccaccatgcctggctaattttttgtagtttttgtagagatgggggggtctcactatgttgcacaggcgggtctcaaactcctgggctcaagtgatcttcctgccctggcttcccaaagtgttgggattacaggcatgagccaccgcgctcaggcaaggcaacttctgacaatataattgtgctgtgagcgaggtaaagccaggcttggagaaggctccgattgatgatccttgggtcggggcgaacagtgggtcctcaaacagggcccacgtttcaagtcctggaaaacccacctatcttagcgggcaggtatatccgatgtctccgttgaaggccttcagtgaggtggcttcgtctcttgaggtttatgtccaggatcagggctgctcttccactcggggtcacaacctctggctcaccaccttgtcaggagccagcccactaagtcacgtttcaggcctgaaaaccaacaacaaaagatccgtaaagacagaaatcctgggactggctcctaacaacggccagtgacaagctttgtggcagtgagcagaggtgtccctcaggctcagctcagtctctgtgggttgcaggacctgcccttggaggtgggcctgggtgggaggtcttagggccccaggacctgggccacctggggctttttttttttttttctttttgagatggagtcttgctctgtcgcccagactggagtgcagtggtgcaatcttggctcactgcaagctccacctcctgggttcaagcgattctcctgcctcagcttcctaagtagctcggattacaggcgcccaccatcatgcacggctaatttttgtatttttagtagaggcggggttt[132 bp omitted]gaaacaagttctctatatgttccccaggctggtccaaactcctgggctcaagtgatcctcccacctagacctcccaaagtgctgggatttcaggcatgagccgcagtggccggtcagaacctggggcccttttgaactttgattcctcagcaattttgtcagccctggctcgggctgagaagcccctgtgaagccagagagggaaagggacctgtccagggtcacacaggaatcatgcgtcaagcctccccagccacggacttgtctccatccagggcatttcagcccctgcagggcagtggcctgcccctcctccttggagccaggaagggatgcagtgccacagggatctggctctgtcccaggccctgtggggctggcagttgagtaagcagtcaggctgggcgcacccatccctcccccactccccactgcccagcacagtgcattcatgcagctgggccccaccccatctccagaggcaccttccactagcaacagtctccccaggcacaacacagctaacacaaggccccgcaggcaggactctgggacagacgcaggccaggtgagcatctgaacaaggggcagtcggccagggtgggcttgcgggagtccccaccttgacctctctcccttccagctgcccagagcccagaccaagcatggacgccgtggatgccaccatggagaaactccgggcacagtgcctgtcccgcggggcctcgggcatccagggcctggccaggtgagctgtcccctctcaccttcctgaccccggcccctgagaccactgttccaaccgtgtcccctgcctccaggtttttccgccaactagaccgggacgggagcagatccctggacgctgatgagttccggcagggtctggccaaactcgggctggtgctggaccaggcggaggcagagggtgtgtgcaggaagtgggaccgcaatggcagcgggacgctggatctggaggagttccttcgggcgctgcgggtgagcccccacctcacagtcaaggcgtgtgccctgggcatggggcgacagaggatgctgagatgcggagacggggactcctccctaagagctgctgttaagaggcgcctgctggggcatacagccccagtgctctgcacagcgtcttgggggtttgggtgtgctacccaccacccccagtcaccacctcctgtcccagccccccatgtcccaggcccgggaggctgtcatcgcagctgcatttgccaagctggaccgcagtggggacggcgtcgtgacggtggacgacctccgcggggtgtacagtggccgtgcccaccccaaggtgcgcagtggggagtggaccgaggacgaggtgctgcgccgcttcctggacaacttcgactcctctgagaaggacgggcaggtgggtggctgcgcggggggccccctccccaggcagttcctcggccgtgccccctcacggccctctgttcccaggtcacactggcggaattccaggactactacagcggcgtgagtgcctccatgaacacggatgaggagttcgtggccatgatgaccagtgcctggcagctgtgagcagctccggctcagccctgctgccctggcctgtcactccccacccctgccggagacctcccttccctgggccccttctctcctgggcagccacaccacagagcggggaggggcaggtgggggaatggaggctgcaggactggctagaccaggtccctgccggtccaccaggcggaggtgggacaaaggtcctaacaggagtcactggctcaggaccccagggagaaacgctctccccacccacgccatgctgaccagagatcttgcagcccctgtggatgcccccgccgaggtcccccgatccccgcacccggactgctgctccctgcccctcccttgcgggtcccccaggaagccaggtgaccccaggtgggaggctgtgtgtggaggccatcctggaaggaagtttagacctgcccaggtgtggagcgaggggcacaggggcatcctaacctcagaaactgaaataaagcctttgaaaaaaaaatctgtaaaacatcaacccccaatcagaagatggcaaatggggaataaaaatagcaggtaacatgtccagcgggcccagtatctacattctggtgagcggcccgaggctgggagctctgggcgggggcagaccggcggggccttgcagcaggggtgggggtaaagtgcgggtggtggtggagagaacagggctgtggctggaccccagcactggtgacacgctgggtgggagcatgaggccccaggctgctggaggtcctcgcccggggaggtggaggccgttcctggtcaggggcttcctgaggcccctggggcatgcagaggccagggttttagttaaaagtttaatgtagttcccaaatacatttcatatgacaatcttacataaatgttccaaaacacatgggcgttatctcgttgtactcgtcactagctggctaaggcttaaagcagagacgtgtgactgggtctctcgggagggcctctggttcttcccgggctcaggcttgctgggggctgggggccagggctctggcgacctagaggtgtggacggcacagctgcaggaggccttctcttaaccctccgagagtgggactgggagatttcctctgaagtcccaaagaggccctgtgcccaggggacctcctcctcggcctcccaggtgggtggtgcaagctggctcttggccatgctccaggctcgggtgggcacaggcgtccactccagtgtgctgcgtgcttgtgagactgcctgttctgggaccagcccctgggctcttccaccaagatttggtgagggtccccctctgcctctcacagaagcccctggccctggactgtcctgggggcagggacacctgtggctggggaagggatggccaacagcgggaagcagtttgcgcctggtgcctgatgatggtgaaccacgtgacagatggagacgggagtcaggggaccctggggacccttccaggtccagtgaccttttcccagacaggcactctccaggcctaggacagacagggccccaactcctcatcaccccatgacttggcctggaggaacctggggtgggaaacaagtagtcccccaacctcagaggccagaaccacaggtgggggacagggacctcgacagagctgtgcctgctcaacgctcgagagcatcttaacctaagaaaccaaaacaaagccttcgaaaataaaaagaaaaaaagatgtaaaatatacacccccaatcagagaggggaagtgggaaatgaagatagtagttaacagcacgtccaatgggcccagtgtctacactcgtacgagcagccccccaagctgggcgggggtcccaggcctatagttggggagccctgggcaggggcagagggctggctgctccccacaaaggcagggccccacagcagggtgggaagggtgtgggtggcggagaagccaggggctctggctggacccagaggctggcgacacgcggggtgaaggaacgaggtctccagtcccagtgagaagccgtgacaagtcttaatgtgccatttcaattcaaaggaggggagggaggaaatgttcttgtttgttcgctcatcaatatgatgaggtctcgtgtcccaaaccacattcaggcagttcccgagtctgcttttgaacaggacgtgcgggtccagactgtggccggcccagtggggtgtgtggttcccggccccgcacctggacgctgccggtggggtgggggcgggtgggcgggtggatagacggacaaagcagcagcctggtgtgcagccgggctcccggccgctatgtgctcccggtcgtctgcccgtccccttcgtcaccagcacctgcagggaagcagcagccccgcatcaggatggagcccgcacttcccaggtctggccacccccgccaggagatcagcactggatcaaggatggcgggcagctctttctatcccccccagggtagggaccacccgactcaccagctgcggtggcccctgaaggagccaggacatcgtcatcgtcgctgtcgtcctcctcgttggatggggctgccccaggctcaggcgcgggcatcttggcctcctgctcctgctccacgcggctgcgcagggccaggatgcggtggtgcagggctgcatacaactgacctgtgtccttggagctggcctgggaagggaggagggtatgagacccccggaccccagtcctaccccctcctgccttctgcagaacacaagtgccaagtcccaaggttcagaggtgacactgccacaaggccttgtggggaggccattggccctgggcctgccggcctctccccgaaaggatgccaccactcccaggtggctgggaatatcccagaggtcagggttggtggactcgactgtgacaccatgacataggagagaggtgaccgccccacagggctgttagccctgaacacatcacaacccctcagccaaaccccagcggcttctctgggttgagaagaggacaaggaccatgatctctattcctgaaggctgggactggcgggtcccatagtgcttcttgtgtcccaggaagcaactgaagcccctcccccctcccctccccaccgtcctgcctgatctgtgtgcccaggaacccccacagggctggcaggatgaggggtcccagatgcacccgcgtggctggctcaccgagatcaggaagaccttcacgccctggtcctcggtgtccatggctgtgatgcgaatgctcttctcgctggccttgtcgatctgcatctgggcccacagcttggtgttgaggatcagtcgcaggctcccctgggtccgcatcactacaaccaacaaggccactcagccctggcccccacaccggccccctcacaaacagccagctccaagagccaacacagtccagatggaaagcgacatcaccgcgcaaaagcccatgatcctcccaggacccacccacagagcaagacttctccctgaggccagccctggcacacctgctcccggggcggggctcctcctccccaagcctggaccactgaaggccacaactgcaggtggctgcacaggctggtgctgcagatcagtgaccagaggccacatgcagcttgtgggaggttgtgtttggtccacacaggtgggcaccaggatggcagttcccttggagaaggggggattagagaggagtacggggtgggctgcgggaggcaggggctgacactcaaggtgcatgcgctttctgtgtgtgtgagacatcggcctccatgggagtccacgtcctcctgactggcctcccctgagtgggccagccctgccctctggtttccttaggagaaggcagagtaggaccgcagcttagcgcttccatggagaggagacgagaggactgtgggcagcagattacggaggaaaatgggagggccctgactcttctagaggatgcaacacccctgcgcctggcctgggcccaccccgtggactcagccaagcccctaccttcctgccagccgcctctccccactggagcaggcctggagacggtcagaaacttgtccccctgccctggcccagcgaacagacctccctgagcccaggtgcccacctcagaggccgagtgggagaaagacagaggtgattttgctctccctgaagctggggagggtactgctgccacggggctacaggctgatgacccaggcagaggggatgacctgggggctcagggctctatgccctctctttccatggacatttgaacatttccacgagacaaaaggaaaaacacaagaagacgtccataaggctgggcacagtggctcaagcctgtaattccaggactttgggaggcctaggtgggcagatcacctgaggtcaggagttcgagacaagcctgaccaatgtggagaaaccctgtctctacttaaagtataaaaaaattagccaggcttggtggcgggtgcctataagcccagctgctcgggaggccgaggcaggagaatcgcgtgaacctgggaggtggaggctgcggtgggccgaaacgaagccactgcactccagactgggcaacaagggcaaaactccgtctcaaaaaaaaaaaaaaaagacgtccatggggaacaaaagagcagtcccagcctgcagggacatcccctgtctgttctgaccagagcagtgtttctgattgaagtgcatgaacactacccttcaagggggctgcttgagttactgctgggcctgaaacccatatttatgaaaaggccagaagacactttgatttgggaagataaaacaaaaagatggtcccagcgcagtggcccacgcctgtaattccagcgctttgggaggctgaggtgggaggactgtttgatgccaggagctcaagaccagcctgggcaacacagggagacctgtctttataaagacaaaaataaaaacattagccagacgtggtggtgcatctgtagtcccagctactcaggaggctgaggtgggaggatcacttgagcccaggaatttgaggcgatgatcacactgtattccagcctgggtgatggagtgaaatcagctttagaaggaaaaaaaagacacgcccacatttcaaatgtgcacacacacaggctgatttccttaagtgggtgtgtgtatgcaggtactccaagctaaatgtccaccaatagggaaaagtccattgactgtcaatggaatattaacatgaaagcttttcaaaaacagtatattttatttttttttgagatggagtcttggtctgtcgcccaggctggagtgcagtggctcaatctcggctcactgcaatctccgtctcccaagttcacgcaattctcctgcctcagcctcccgagtagctgggattacagacatgtatcaccatgcccggctaatttttgtatttttagtagagacagggttttgccatgttggccaggctggtcttgaactcctgacctcaggtgatccgcccaccttggcctcccaaagtgctggggttacaggcgtgagccactgcgcctggccaaaatttgtctttatcaagagattagacttgatgtttgatttcattttcctttctatcataaacctgccactttgtcagaaaatcagcttaaaaacttccatagacttttgtccattttgacactaagagggtcacggacgagctggcagctggagccagtgtgtgagggtggtgttgagggctgggtgcagggagggggtttggggggcggctctcatgggagaccgactctgtgccttgactctcacaagggtagggtcaggatctcccccgcttcattccctttggaattgcatagtccccagccctccccatggggacccggccacagcccccgccgtcggcagctcacctagtcgggactgtagtgtgccgtcatcggtggacgccatgtcattgagtctgagcagcccccggcctctctccacccaggactgtgaggtcttgtcaaagacaaacagcttgcactgcatctggaacacagtggccgccggtaagcagggaccccagctggtgtcctgctgcagccacaccctgagagtcgccctttagcctgtggggactgccagggccagccaacgacggcctgggggccaccttggtcagttttttgtcctgccctcaagctagaacaggctttacattgtataaggggtatctgaaattaaaagaatcactaaggaaatgaaaagcaaaacaacggtgagaagcctctctgcgcactctaggacggctatacccatgtggggaagctggaaccctcacacactgctggcgggaaggccgcatggtgccactgctgtggaagagtctggcggctcctcaaactgcttaacaaggaattaccacatgcccaagcaattccattcctcggtatgtacccaagagaaatggaacatttgttcgtgttcacacacagatcgcacatgaacgtgcacagcaccatcattcacggtagccaagtctcaaggaggaatggagtgacacacatggtccgcccctacagcgcatctcactcagtcttaataaagaacaaggctccgacccccgctgcaacgtggatgaacctctggctcagcgagagaagccagacacgaaaggccacatagtgcgttgatgccatttatatgaaatgtcaaggacaggcaaaaaacagagacaggaagtggatctgtggctgccaggggctggggagggaggaggagttactgcgaatggacaatgctctttctgggggaatgggacagtgttctttttgggggcagaaatgttgtacgttagattctggtgaaagttgtctgactctgtgaatatactagaaaccacggaattgtatgctttaaaaggatggattatatagcatttgtactatatttcaatacagcagttttgtatatataaacaaagaaaaatacgagacagacacccctacatggctttccacataccccctaagtcaatctctttcaacatgaacagatgacaaagtggtaagtgggaaaaaagaacagtgctcttaagaacgccacgatacgccacccggtttacagacacagacacctgcttatgtgccacgggagaggaagcacatggatgctgcccaagccgggtggtgcggcctgaggagcaggaatgggggatgccaggaggggacggtggggtggaacctctggccgcacctgatcttttccctacgaagacaccacaggatgccaggtgacaaataatacagttgccagctctgggcgacaagagaatatgtttggtatgacagtctttgtcattc[137 bp omitted]tctactaaaaatacaaaaattagcctggcgtggtggtgcacacctgtaatcccagctactcaggcgactgaggcacaagaatcccttgaacccaggaagcagaggttgcagtgagccgagactgtgccactgtactccagcctgggtgacagagtaagacattgtctcaaaaaaaattaaaacaaaacaaagaatgtctcaaacagatcctcctcctctgaaaccaaagacatgcaagaagcccctgagcctaagctctctctacaaacgccaccaacaaagtcccagagcgtggggccagtggcccctccgtcatctcaggggcaggcctgtgtgctcagaggatgtgggcccagcccttgcggttggacccccaggtgcatggaagacccagggccaccgaggaggggccggcccctcacctgtaacacattgctctccgcctcctccccggtgatgacttccactttttccaacaaacacttccgcgctgttgccttggtgtaggcggctgccgactcagccagggactctgaaaagttattggccaaaaagactgactgattatttggcgagaggagagccatctcccctcatccgacaggagatgagagggttggttctggtctcaaggacgcctgctgcccctggcaggcctgccccggcaacccaagtggaccctagacacagccagagcatatggcctcagaagctgcagggagaccatctgggggccaagtgtggccccagactctcgtgttcgtgccgagcagtcgacggggggacagtgagggactcctccacgcctgctgcctgcgcctccccaccctccccacggccacaaggcgacacaggccctcgagttctttatcacaaacccttgctcactgcaaggcagggccctggagctggttcacatgtggttgttactgctgcgggagtcgggccccttatccctcccggctgggggtgtgaatggacccagcatcccccaagatgacctaccatgagccccatgctgtggtgggacgctaacatacctttctcaggggtggcctcctgggacgaggactcagaccctgactcggcagctgcattttccctgttggcatctgaactgacctcgtttaattttggggggctctgcagggacacaaaagcatacaaggaagagggcacttgtgtggtccttcagcagcagctctgagcacctctctgcctggcccccaacactacgctgcccccagcactcctgcccactcccggtgacaccctgaactgcctgggagctccccacgtggtccctcaggcatcactacggggtgagtgccaccagccgacagtcccctcgagccacactggtcactccgtctgggtgaggcaagactttgaacatttcattgaaatagaaaaagcacagcgtggccacgaaggaagagaagctgcagagtacttaatgcagcctaactccagacagagctagagtgaccaggcggctcaggacaggccctcacgcagtcgcaatggagctgggtggaatcaggaagaaaaaggaacatgtgtaaagaggtaggcaaaccattctagaaccctctcccaggctggctgggctcctgggaacggagatgggcctttcgtgcacccaaggccttggccgcggttatgctcacaggagcagggaggccagcaaccctgtccaccagcacggctggctccgtcccacaggacttttgtcagttggcctggtggggaggaaccatggaccccgactgccagcaggaccctgcagcctccagggaagcccatcttgggatgaagttggccctggtcagcacggaggagccgggaaaagcgaatgccagttcgtaggcagccagtggccctggccagttttcaggctgagtctgagcagggtcttccctctctcacttgctactgaaggcatccccatctcacataggacgacacagcagccctgctctccatgtccccttgacctgtggctggcgccgagagcctctggtccctgagaacattcccaacacagccactcaccaaaactcgctcgctcatgttctggccaaatacaaatttgttgctggaggcgtcggcactattggttgagttctctaaactgaagagaagatgtgcaatgagtgtggggcgtcacgtgggaacgtggccaggcaaatgtatgggtacccatggagcacacactgacacagagggcacagtggaggggcctccgccactgtgcacggggtggcgtgtcagaggcaggaagccacacacctccctgtgccattgaaaacattaacccttagctcgccctgatggaggggccccacagcatgagggaagccaccttccacctgctctacccgcccatctcccagtcgggacacgctttcttctgagacacctggaggggcagctggtccgtgggtagcattacccccagccatgtcagtcaaggacatgatgaggtctttgccccaggtgcccaaacccagaataagggggcgcctgagtcgcctctggcctgctctgttctgctctgggcatgaggtccacaagacagagggcacactccaagggctgggctgtagcctccatgggcccctggacaaccccacagaactctggtcctgtctcaggcgtccagtgaatcccaggacaaggcccaccaccctggcccacccaaggttgtgcccagagtggggaatgagagagaggggcctgagagcaacctggattctgggcctgagtcgggcacggggaccacagacccctctctggcagaagccctcgcggccacctgcatcgccatgccaggctggccgctgacaccgagacacacacctggaactgatatactggaggaaatagttcgttgcggttggcgtgtctgcgctggggtgtccagcattctccatgtcggcttcgtccacgctctcatttatcagctgggaatgagacggagcgctcagtaatcgggggtgggggggtgcctggagttccacagctcagtgtctgcagaccccctgagctgcatggagctgctcggagccatgaaccctctcctgtacccgcctgtgtgtgtgcgcgtgcatgtgctggggggcagggctataatcaactccatcaccttttgctttaacagttaggatggaaagagagctcatgaagctccaaggagccttttccaccttgttacaaaaccacgccttgttataaaaccacgcctaagctggcctctcggtcaatgcttcataccaataacacaacgttacaaagctgacgttttggggggtttactatgaacatgatagaagcagaatttcttgagggcctctttcctaccagctgctatgctgagtctgtcaaatgcacgatctgctttaatcctcacgaggcctgggagggggatgttagggaccctgtttgaccaacaaggaagcagaggctcagagggttaagaaaccatggctctggctgggcgcggtggctcgtgcctgtaataccagcactttgggaggctgaggcggcggggaatcacttgaggtcaggaattcgagaccagcctggccaacatggagaaatccccacctctactaaaaatacaaaaaattagctggatgtggcagtgggcgcctgtaatcccagatatttgggaggctgaggcaggagaatcgcttgaacccaggaggtggaggttgcagtgagcagagatcatgccactgcactccagcctgggcgacacagcaagacttcgtgtccaaagaaaaaaaaagaatccatggctcaagtttgccctggaaggagaggctgggatttgactgagactgcgaagtgcacgtaagcctctgacttctgcaagaagccaaccccaccaaattcaaagcagctgtctccccagactcaaggcagagattccacagggcctgaactccacaggccaagcccttccccgcctcttgccctccctccttggagggaacagcccctgagggactcattattttgcctaaagccatggcaacagcaacatcaactttccacgtttctcgacttgggcttctgttggacggtgagtaacagaaaggaaagcagaaaacacaagccggtgctttctgcatgctagagaggtttttgtttatttcagggccctccccgtcgacactactgacatgttgacactgggcccagaacattccctgtggtgtggctatcctgggcactgcaaggggcggagtggcatccctgacctccagaagtacctcccagttgtgacaaccacaaaagtctctagacacagccaccgataccgcctctcgagctttgaaagaagcttcttgccagtggagctgctagagatgccgtagcacattccatgtctgtggctgggaaaggtggtgctggctgaccctggtcttcctagagtcccagtgcatggtccagggccactgtttccaaccactgccatcccttccccaccacacaatctccaaactaggaccacatgtctggagggcagccaagaggtggcagacgctttgctccctttcaggagagaagacagtgttgtcaccccaccctgccccacttaaaaaaaaataaggtgacagttcttaatgggggcgattctactccacagggaatactggccacgtctggggacatttgtggttgtcagatgtcaggagcattgggtgggtggaggccagtgatgctgctcagcaccctgcagtgcccagggcgactcctcagaaactaagaatggtccagccgtaatgctgctagtgctgaaacagagaaaccctgaaatacgggaacagaaacctctgggcagagctgagaacactggaccgtgctgtctttcttctctgctatgaaagcctgaggcctcaggttcagtcaccttccctgtccccgctaccatgagaaccagggaccctgacttgagaagtcactgcaggtgagggctccgaagcctgggctgctggtggggaagtgccagggcccagcacacgcacaccagcagcagactgtgccgtgagccatggggctgcctcgctaacaccttctttgtcccacgctcccctcccctgttaaaaggaaaatctacctacttgcctgctgttgaacctggggaaggcataaaaagtcaatgtgctggttcaacagctcacataccttaactctgtccctcaagttctgcccaaatacaaaggcttgctgtgtggcggggtcttttttctcacaggcttcctcttcagaggcattgctggactcatttttctggggctctttctcctatcaaaaaccaaaacaaaacagagtaatcaaaaccagtgccacacttggcccagacggatgcccagcaatcccacaccagatcatgtactccacacgtctcctctgcatgtgcctgcactcccagctactcagaaggctgagacaggaggactgcttgagcctgggagttgtagtgagctgagatcacaccactgcactccagcctgggtgacagagcaaaaacctgtctccaaacaacaagaaacacctgtgccctgcagaagccttagtgccggcagaggacaggaaataacctggttgctcatcattggccaaggaatgaaataatttacaatagaaaatatgggggaaaaaaagtacagcacagctattaccaccgagagggaggtaggcctctgacatgcccacaatacatggatcagagaagagagcagcttgtgggacacggaagtgcgattccatttctgttaaagccaatccagtcccgtgtgtgtggtgtgtgtgtgtgtgtatgtgtggtgtgtatgtgtgttgaggaatgcccaggaaaataagtcgggagagagaattcaaactactgacggaggttacccgggaacctcttagctggagggtggctcctgcttgttactttctaggatttccattttgtgtaaatattttcaacatgtaggcatgacttttttgtaactaaatatcctaagaccaaatgcatttatcttgagataatggaatatggagttgctagtaatttgtatatgtctttcctataccacatgatgaaaaaggtgttgtagaatttgaaaagaaattttaaaaggcttttggcagatctttggagtctctggcgatgtgtacagtggacatgaacgtgaggcagggagtgttttcctgggagatgtcgtgaagggacctgacaaccgtgaactcggaggtgagaaaggctgcaggcagcttctgactggctcagcgtgtccagcgggcagggaagcctggagttacaatgccaggcccagaatcagcggatcacagcgctgagggcactttctggtccaactgtgaaggaagtgaaaagtgtaaatgtttctctactgtgctccctagaaattctgctactgctgacttcacgctgcatccttgtgcctgtgcaagagtgaacgtggctttttaaaattaaacacacaacgtgtttggcgacctggaagtcctcagaggatgggctaatccccagccccactggggccgcctgcatcccgtccagcagaaacactccctggctcttggctttctgcgctgtgtgccccctgctcacaccgactggtgctaatcccgggtgggtggagcccacagagtcacctgagatggggcaggcaaacagcaaaatgtttctgactacagggtatgtctatgacctggcggagcctgcttagaggattcgcttaaactgataaacgaatcccgaggcctgtaaccagtctgagactctgtgtgtgtgtggggcgggaggggaagcctcttccccactttcccaaagacggtaccaggagttcccccatgggtcgcccccaacatctaagccctccttagaggagatgcctcatagctcacgttcccgatgagcagtgtgtgccatgttcatgggcggcttggaaaagctcggactcctgctgtagggccagagaaggatacacacagcgagcctggcgaatctcaacagtactgggtgtggtcagagggcagcgtgggtgtggccgcatggctccaccccagacccacatggagcagtggctttggagccagacgcaggagctgggaatggcagccagcacatcacaacttctgagctcaaccatttgggaacaagctgtgtgcactgctgagaaggggctggaaccggcaggaagacggactccgtcccctgggatgggacacagcaaggcctctccagtgaggaacaagctctcggtagcgggtgctaccaggtcagcctgtgcactcaccatcggggacaatcagagacactgggagatggcgggacgggctgggtcacttctaagtccttctccaactcagaactgcacacctgatctgctcaggagacctcagcagtcaaagcttccaagccgcagaatgcggtggaaatgatccctatttccaattcagcaaactcgtttgaaaaagggcgtgaggatgttttcaaatttaattgtggacagccattttcaccctttgagccagaacatctactggggatggagggtataaaactgcaggccatggacacagagcggaaaataaacacaaagatccaatctggcttttacacagaagataccacatggtgttaccctaattctgacttcaaacccatctctgccaacttcaaaggaggctcttcatcaaaggcccttatttcacagtggctgtgaaacacaaagcttttggcccatataatccaaaccatacccccgcttaaatggaactatttctttttttaaggcagggtctggctctgtcgtccaggctggaatgcagtggtgtgacctcggctcacagcagcctccccttcccgggctcaagcaatcctccagcctcagcatcctgagtagctgggactacaggtacatgctaccatgcctggctaatctgtgtattttttgtagagacagagtcttgctatgttgcccagggtggttttgaactcctggcctcaagcaatccacctgccgcggcctcccaaagtgctgagattgcaggtgtgagctaccgtgtccggcctaaacaaactatttctgagatgactcccaaagaaaaattttcaactggaaccacacagataggagtctctgaggggtggtttgggtgtggacacagagaggggagacattcctcatgttaaacattgcaagacacccatcagtgacagccgttcctcgggccctagtgactcctcagagtgcagtggttcaggtcctccctcaaggatcactcccgtgagacatgtggcggtcagccttgggtaacaggcccttccggcagaactctgggcaacaggtccttccggcagagcttgcttgggagacactcttcttctgcctgaccagcaagaccacccttgggaatctagatctggtttgtcaggtactgttatttagagcctactgagcaaatccagagagccttacaataggcccacgtggaaactgcttggaacaggtgacagcgtgtggactccacagcatgctgggaaggctgccctcccgctcccaaggggcctagcatgcagcgcttccctgcctcaggacccactgacctcaagtgcacacacctcatcggcagcttcggaaggacttctccatgcagcagtgtcaggggatgctgcgggcactgcccccgtgcagtctgctgggaggctgaccccgttggtgccactgctggggactgtgggagggaaggagagtggggaatcacaggtgcttggcggccctcccacccccactcacatagctgaggggctgggccacgtctagtctagggcccctcccatggtaaagcccacagcacatgtctcctttttaaggaaggacctggtatctctacaaagagccaaaattcttggatttaaaaaaaaacaagagaaacaaacaaaaaagagaaacctgccgggcacagtggctcatgtctgtggtcccagtgctttgggaggctgaagcggggagaatgcttggggccaggagtttgagaccagcctgggcaacacagcaagtcctcgtttctaaaataagataaaacaaactggctgggtgtggtggtgcacacttgtggtcccagctacttgggaggctgaggtgggaggatcgcttgagcccaggagttcgaggctgcagtgagctatgattgcaccagtgcactccagtctgggtgacagagcaagaccccatctccaaaataaataaataaataaataaataaaatgacctttcaagtttttaaagataacctgtgaaaattgaggctgaaattctatctgcaaacacacagggataaatctcattcccaggagccggcctgcttttatgaagacagtgaatgaacaaagcaggtttcacccacacagtcacactcagccgagagctgtgaggaagctgtggagccgcctctcccttctccgttgccagggctcaggaggcttggggctggagacggctggggggtgatttaaaggatcatcttccctgatctctctgtatttctggtgcattcagcagtcacctctgtcgcaacactgctgtcccgggtgcgacttcgggaacgctctaccctgccgtctgggcctgggcgccagggctgctgtttcttaccagtctgggacagcgcctttggctgcggagcttgtaacactgccgggcgaagcacgctccgctgctgctccttgggcttctggcttggcagacctaggaacagaaggcggccttcccagtgcccgtggacccctgcctgcccccaggcgcttcagagactgacccctggcatcccatttcatgccccttgcaggctagactttgcagggaagcacttttttaaaaacttgaggtctttttttaacagctggccaggagatctggctactgttatttttacatgtgattacatgaaactcccagtgaccgacgcctgtgaattaatccagttagcacagtaacgtggcggggcgccggcagactcaacagtcaagtggagactgtgggaggagagcagtgcattcacaggcagctacctggaggctcaggactcggtgtggggtcacgtacaggcacattttgcacctgtttttcaaaacagccatgctgaggaagtccctctgccaaaggcagatgggacaaggacccttgcatgtgccctgccctgtgcagcatccccggcagcctcactagcagccggctcactagcagcgcgccgctggaatgcagccaccctgctaactggggcgaacactgtggtatgtgggggccagaacatgaaggacagacaggctgaaccaagtgcgctactgctgggcatggagcccgcccgatgcaccccgcctagcctgctcccgtgccaccactgcccacttttctgaacacacgacgctcacagtcaggggtcccaacctccctgctcagacagcctctctttaaaggaactttccagggctcgtgggtcaagttacaagtgatctttctagaaagcaggctgagcccgcggtgccctggtgtggcctagcagaggtctgaaaaacgtcagagagccaccccccgccccagggaggtagacgacctacctgcgctgggggcttggccgtggatcagcgttggtggcttcaaccggaagccactgctcctttcctctaaaagcacaagacaaaatatcaacagcaggcctgcctgggctggggctgggcctggggggcaagggcaggagaggactatggtcttggcctcagtgacttcgggcctggagaaccagggagaacatttccaaattacaacagaagtctcgtccgatcagcaggcctggaaggcgcctggaggaggggagagacaagggcaggaggaacgatggctcttgggccagctgctgaccatgggggcaggtggggcgtcagccgccctcccagctgtctatgacctgctgcaggctcaggagccgagctgctcagcggccctgtacctggctctggagaatgtcagggagccacggaacacaggcgctcaggccccacttccctttcctagaaggcttgtctgtcagaggatgcggctgtggccaggaagaaccttggcaccactacagatgtctgggaagtgagacaggtttttgtgatgaaaaggtcaaaggtggcacacagtgagcctgcctcccctttccagatgtgcctgcggagcttcccgtctcagtgagggggcactcctggccaccgtggaggaggccagctccccctgggccagagtccgggctgacaaattcacaaaactagagggaaaggtgaatgcccacgagctcctgggatggctcgagagcccagcctcgcccagccacctgtccacatggaccccttcatctgtgtgtcttggcaactgtgcccatacagggagtggggatggtggtctaatctgatccacaacaggaaggattgtcataaaaggcctgtgactcaggcaggcaagcctgttcctgggcaaggcacagagactgtggcattatggctcctggaggtagccctgcgtttgtgctaagcttcacccccttgtcaagctacaggacacaagatcaatatacaaaaatcgattgtgtttctaacactagcagtgaatgacccaaaagcaaaattaagaaaataattccatttacaataacaccaaaaggaataaaatacttgggaatacatttcacaagataaaactataaaacaatgttagggccgggtgcagtggctcatgcctgtaatcccagtgctttgggaggctgaggcaggaggactgcatgagcccaagagtttgagatcagcctgggcaacactgcaagaccctaactctacaaaaaattaaaaacttagccaggcatggtggtacatgcctgtagtcccagctactcaggaggcagaggtgggaagatcacttgagcctgggagcttgaggttacagttgagttacgactgtaccactgcactccagcctgggcgacagagtgagaccttgtctcaaacaaaacaaaaacattgttggaagaaattaaaggtgtaaatcaaaagaaaaacaccccctcatgctgtctgattgcatttctgtgaaatgccagactaagcagaaaggagctgagcggttaccagggctcaagggagggggttgggggcaggctgtgactaacagggatgaggtttctttttgggatgatggaaatgttctaaaattaatcacgtgatggtcgcacaactctgtggatgtactaaaaccactcaattgtacactaaaacgatgacaacaaaacccaaaacaccttgtcagcccaaattttcagactccaaatcaagattcagcaggccaaggaagacccctctcccgctgtgccccggaggcgccgctgtgcctgggcagcaagaggattgcagcaacccttcttactataatagttgtatgagggagtccagccccaggggcttctggcagcctgtgttagcagagctggtgcctctcccgtaacagactggtcataaaaaaacaaactcaggagagccagatcctgcaggatgcgggggtgagccgccagatgttccttttccgaaggaaacactcaattacatttccaaagcacggagctatgcagaagacgactggcaatttagatacatttttaaaaggtcaaattcacaatttagatagtttttagcaagctcttcaagctggctctccacgctgatgttttggtcacagactgactactgcccttccacactccgctccgtgcagcgctggcgctaacgctgaggggagcctgggggctggcccgagctgccaagcggaagcaggagacttggataatccctgccaccgacctgccactagtgctaggcccagagcgtggccctctccagagctgcagacagacaaggcgtgctccaggggtagccaaaatctggaggtccctgtcacaggccctgctccacgaaaacaagggtggtctcttctcattccttccagaaattttcttctgcaacacaggtcgcaacacaagctgctgaatcatggccagagcccgacgcctgccacatacccaaagggtgtgggcctgtagaggatgctgcaccagtctctgagggatgcgcatcactccagagaggaagaggacccctcccgccggcagcctttgccctcctgggaagctggcaggctccctgtctgagggtgcttttcgcctgcctcagagagccccaagtgatgtctgtgggaagccatgcttgccccccagggagccccgatttaaccagggaagggatgggaatgagactgtgtgcatcaaatgctgagaaggcagcctggctggagctggggtctgtgcgtggacggcgctggtgcagggtggggaggaggctcagccatgcggtgggcagggagtgatgcctgatgcacagaggacagagggtgccggtttcttagtgccagaagagggaggaatataccaagggaggcacccacgtgcccctggcgtcatctccacatgcaggcaggcaggcagaaagtaagagatcatgtggacaaaggtgtgtccccagctctgtccgtcatctccacatgcaggcaggcaggcaggcagagagtaagagatcatgtggacaaaggtgtgtccccagctctgtccgcggagggccgggagcagggctacacctgagtcagtgagatcgcagtaccgcacggagtgatttcagaccttggtttctaaagaccatgttccctgaagaaccagcgtgcctctgagaaatgcagattccaggactgggatgagaaaagaggctgagccgggaggctcttgttgtgacaaagtaagggcagtgctcaaatgaacaacggggacctgcctgacagggcttccactggccaaatctgggacaacctgaacattaaataaaaaccagtaaccatagacggtcacccactgatgccaacagaagctcgcctgtctatgttgacacaatcgatcaaggaacaagcacgtggggagaagggcaagctcctccttccagtgaacaccactaatcaacgcggcagggatggtgctcagagtatcccacgggtggtgagtgcctgtaatcccagctacttgagaggctgaggcttgagaatctcttgagctcaggaggcagagggtgcagtgagccaagattgtgccactgcactccagcctgggcaacagagcaagactctgtctccaaaaaaaaaaaaaaaaaaaaaaaaaaaaggaagaaaatcccatggggcagtcgtcagcgggaaacatcactctaaagacatcactgggcgcgaacactggagggcaggagtgtgatgaggtacacacagtcccagagtctaaagtgtctctcagaaaccatccagcacaaaggggaaagtagctttacagtggtgaaacctggcagacagcaccctgatcgaggagcacggccaccccgtgctggtaaggggacaagtgagtactgtgcatggcttctgtgacattctcatccaagatgccacacctgggtctcaccaccaggacatactggacaggccccaactgagacacttctacccaacagctgacctgtaatcctcaaggtcatgaaagtcaagggaagcctgaagacctgttcccgataaaagtggaggtatgtgtggtaggaccagggtctcagtccttttttctaatggactcatggagctgactggagaaagctaaatggggtcttcagacaaaagggacagagaaattcttctgtaagtgttaaagcttttcaaaattaaagctaaaaaacagaaggcaggcagacaaggatgtgaagttgggtttgcagaactgatgtgtggctgatatgactgccttttcatgcgtgagggcactggggctttaaaccatgccgcgtcggggcctgcgaaacagctgccctgctcgaggctggaggggaaaggtctgtggggagagagacaggagggaggccgttgctcacagacctcagaagcgatcatgagatttgtaacagagctcagcagcacaaatgggtccagacacacggctttagtaactgatcacctaaagcagaacctgcctcaccgtggcaggctctgtgcccccatccagaccaccacctgctaagcgacaccccaggaataaccaacatcgtgcccttcctgaggaccctgaaacaccaagcccctctgcaggatgagaccaggtggtcggctcaaaacagtttgcttttagagtcaaaatgccttgttgaaacggggccatcaactcaatgctgagagttataagaacccacctcttcccttgacacggacatcacgccagcagctaacttatctcacaatgcttttgaagtcggcaatgaatttatatatggtaggttgggttacagaattcaggttgttaaactcgcttgttaaatcttttatgaggaatttcagccacgtgggagaaactttcaggaaaccttggagttggttctccagtgaaagaccaaaaaggcaggctccatattcttcagaaagggggagcggctttccttaaaattttaaagctgggggccagacgtggtggctcacgcctgtaatcctagcactttgggaggctgaggcgggaagctcgcttgaggtcaggagttcgagaccagcctggccaacacggtgaaaccctcgtctctactaaaaatacaaaacattagctgggcatggtggcacatgcctgtaatcccagctacttgggaggctgaggcaggagaattgcttgaacccaggaggcagaggttgcagtgagccaagatcgccccattgcactccagcctgggggacaagagtgaaactccgtctccaaaacacacaaaaagttttgaagctgtgattaaacatatttatctaggtaggtctgagcaaaattaatgtgagaatgcacaaaaaagaggtctagaaattcaccaacttcacaggcgttacctttgggatggcagggtgagtggggaaggggcagggattctttttagttgaaatatttctgatttactttaaagaaaaaacaattatgggccaggtgcggtggctcatgcctgtaattccagtactttgggaggccgagacaggtgcatcacctgaggtcaggagttggagaccagcctggccaacaggtgaaaccctgtctctactaaaaaaatacaaaattaccccggcattgtggtgtgcgcctgtaatcccagctactcgggaagctgaggcagcagaatcacttgaacccgggaggcggaggttgcagtgagttgagatcacaccactgcactccagcctgggcaaaaagagtgaaagtctgtctaaaaaaccaaaaaaccccaattatgaatgcattacttgtataaaattttgaaaaatgagtgatacatttcttcacaggttgtttttagaggacttagagctccatgcaaccaggccctgcttgcagaaacaaacatgagggcttatgaagcctcatctcacgccagatccccagactatgagctgaagagttgggggaaaaattttaacagctgaagaagaactgactttaaatgcccgctgaagatctgattttcccacaccaattgcttttcctcccaggagaacccccaggccgggcgggaaggcagaggggccggggctcacttggctctgagtcggaattgcctgcagatggctcgcagaagcttgatggcataaaaacattgttttttgaaactgttgacaaggaggtgcaggcgggggagggaacaagaggaaaaacagcatgaatgggtggggtggacgctcagagatcacctctcccacctgaggggtggattctcacgtcccacgggaggagacggaacagcacgcaaacagggcattcagtctttcccgagaacagcaaaccccaagactctttacagcactacgagggtctccagcccgacggccttgatctgtctgatgactacagtcaactctggtcaactgggggcacccccttgtccctgcacctctgcaggggcagccggcaggggagatatcagatgctccaggccacattggaggccctgactcctcctcacctgtcaaggcttgtccatggggttccccctcccccacctaagatcttccttcaccagggcaactgcttcccagggtgtgggccagccaacaggtttccacaaatgaagtggaattcgtaggggaagaactcactctacgcagaatggaaccaaagacaacactgttcaaattattggtgcccctcacgcctccagttaccctggagagctgagtgtctcttgggggctgctgcgctggacgggaggtgatttgaagagggccggggagaagaatggtggtccctcgcctctttagcctacattcacagcccaaacacctcctcttctctatgctggttttcgatacagcaagcatggttcagcagtgggcagtgagggggaaggaataaaatcaacgagcaggaagtggagctccctcattccacagaacacctatccacaggtgcaaagatccttaaattaaaaggatgccaactgcagcctggactgcaagccatctggacagttccgcaatatccagtcagcagatgacagtgtaatagcactggaaaacctaatgcagctgtgcaaaaagacgcggccatgtccaaaaccaacgtgatgggaaaagggcatgaaaacaagggtgtggaggggtgacttgggaaggaccctggcttcctacgctgtgtgttcctgtaacgcatgcgtgacttctgtaagcagaaacaacttgacatcctgaaggttcaggactgtaaaatgatttacatgaactttccaggaatggatttcagttgggtaaccagagaacctgtctaaacactcatgtatgtccaagttggcactacagacagctaagacagaggccacgagacaatgccagagtgggaagtcaagacggggacgagagaatagccctgcagtggcatttaccctcaaatctgcagagttgtgcccatggcaggaggccgggctttctgagtgttatattaagtagtgctgacggcattatctgcctcaggaacctctctcctgtaccagcctgcatgagtccccaggccgacctccaggcctgtgctcagaccaggcctcacgtccagggccttcaagccctttagcctgccctgctccacagtccgagcctggcccacccttccaggcccccgcaagctcctctcctctgggagttcacagcatcacacacgggcctctgctggggcctcctggcttgctggttaccgtgtgtgtgtgcatgcttgtgtgtacatgcgtgtgtgtgtctgggctactgcactggactgcccgtgctgggcatgcagctgaggggttgggagaacaccccacccctaaacccccagtctgtgtccagccttggaaagaggagatgtaattaacaggcagaggccccaacagggctctcagtagtcaacccctttcctccatttcagagggacgatctcttcacagtcttcctcaggccaccaagtctcaccatgccgtcagtgtcactgattcgagacgaggacccctgatgctgcactctggacaagctctcacctcactcctgacagagcccgagcctcagatcgactctaaccggagctgggcaggaaggacacagcagacggatgcgcggcactgaggggaatggcgggtttgtaagcataaacgctttcaccattccgtaagtttgcatattttacctgactgtgagggtgggaactgggttaaagaggatgttctttctcgcttgacaggagggcagtaatttccatcttctctgtcagaatctacagaaaatgatgagaagaggaggagaaaaatcaggttgcttctgtctttaaaactgaagatggtcaaaggtgttagagagctccttaccttctccgccttcaggactggagccgccagctgacctctgaaacaaggagcacacagccggggtcagagggcatcaggctcacggcagccgagcaactctcggggccgtaacaaatatcccaacatgcaccacgggcagctagttcccagagcccagcacccgaatgagagccaggattttagcctaaagctcaaacatccccccgatgaacctctgcacccagcttcacaaacacatgccaaggaatcctctcagtggctgggaaagcatccgcagcacccagatcagtttcttgtttctccacaggttacgctaactggcctgccacccctaaactcaaacacagccgaacctcatctggcccccgttcattctgccaagagctgaaaagcgaccctctccacccttgagggcagcggacttgtgtaaaatggtcacatcacaccggataggagcgatttcccttccttgccctggaacattctaccatgcacatgcttgtctcagggtcggctgttattcccagagcaagcaagagcttggatgttttggaccaaagcccacttgcgaagtgtttagaacagaaccatcaaagacaaagcccagtcacaggctgagggaaggctcctgaagaattccctattccacaaactttagctttagagtgtgaacaaccagcaaccaagacttaaaatgggctcatgaccagcctgaccaacatggtgaaaccctgtctccactaaaaatacaaaaaaaagtagctgggcgtggtggtgcacgcctgtaatctcagctacaggctgaggcacaagaatcgcttgagcccggtaggcgg[136 bp omitted]gcactttgggaagctgaggcagaaggatcgcttgagcccaggagtttgagaccagcctgggaaacatggtgagactctgtctttataaaaaacccaaccacataaaaatcagctgggcaggggggtgaatgcctgtagccccagctcccagggaggctgaggcaggaggatcacctgagcccggggtctgaggctgcagtgagctatgaccatgccactgcaccccagcctgaaggacacatctcatctcaaaacacaaacaaactcaaaacttaacatgaggagtgtttatcctctcccccaacacaatccctcatttatgtcctgtctcagaatttagcagcccaaagcgcaccgatgagtgagggccgctcctcctggcgcgctccctgcaagagcaagcagaaaagccaattttcttattttctaaaatgctcctcagaggtcaagtttagccaaatgaggcccgcctgcctcgacgagctgctggggcttaggggaggtgatgcatgtgaaagtgctttgcaaactgcagagtggcctgggaaagcaaactgcaataaataaaactgaggagcacaggagccaaggcagacccccctcaagtcagggcgatgcattttcccataaagggccagactgtcggtactgctggctttgtgggccacatttggtctctgtcatatattcttgtttttgcttttataatcctttaaaaatgtaaacatcatcttagcttacaggcccaggcctggagcttgtggcagtgagagcccagagaaggtaggaagttgacttgaagtcacatagctcgttcacgacggtcagaaaaaaagctaccctggactttctcctcccgtgtgagctgacaacatgggtttgtgtgggaaaagcaagcctgggcttcttgcttgaggcccgtgttctgagggggctttggaaatgctcccaagggactgtacgagtgagggctgattatcactatccccacgagatgacatcatcaaagtgtgtgggaaacacaaaatccttgtaacacaacagtgggttctattagtcactggggcaattgtgaaaataccactgagtccaaaacgcaatgccatcaagcagccaggccctagagtcagtaccaactccggccaggccaaaagcacgaggggtgcagaggctgcctggtccctgctgcctcttgaaggccggaagaactcagtgtattccggctctgccattttctacgggtgaaaccttaccttgcccagccttcggtctcctcacctggaaaacagggatgcgtgaggtgacaggcagggcaggtaaggtgctcagcccagtgccctgcacgctgggagcagatgattataatgctcgtgacccacacctgatgagatcaaactcccaaccgatgtaaaatctggaggctacgctgggggcagggctttagagctcaaggcaggcatgaatagggagtcaggggtgtggagtgagtcctgggtgcagccaggaggcgagggacctggactgggaacctttctagaaatgccagagcctggggttgcatctgatagtgctgagctgtcaccaccttgtcatcccttttcttgggtgacatctgtggggtgggtacaggctccagctatcgcttgccctcatacttagcaaaggtgacagaagtacagagaagcagcatctgcccacccgggcagccaaaacctttgctcatccagccaagcctgggcatctcatgcctggggcagctactgccctcgacgggcccttacatcagcctcccagcacaggcagctgtgagaaacaacacctgacacagcctccttgccctctgggtaacccatgccctccagagccctgtaggctggctttggcctccaaatgctctgtgcaggtcactgtctgaggccagcagcctctgcacagcccgatctcctcggacaccgcactgctcgcctcacctctggcttccctggcctcaccagtcctcccatccattcctaacagcaggcccaggacatccccacccccaagtcccatcctgtggctctagacttttctctccccttttaatccaacgagcctttcaactgtaccaaaacccttacacggtgtcctccctggtcctgggggatctgtcccttcctaaatgacttctgggaccaggagatggccataccctctctggcctctgtagacgacctgctctctcatccagtgacgccctccttttccctcaagcgagaatgaaccccttggtgaggtgacctccaggccccttatactctttctctgtggcttattctgatcctgggagttgtgtcagggactccactagacttaggaaggaactggacctcacagtagaagcccgtttagcatttgttcaacaaaagacactgcatcccaggccccttgcaggccacggagaagccgaagacctgagtccggccttacagaaggaactggtccccgagctccctcgtgtctcctcacccctgcacgggatgtttctcctgacatctccacacctaactctctggctcagtggttatctaggttaatttccacatgtgtcaatttcctagtttccgtttttgatttccaattttatctccttgtggttggagcacatactccatattttgatcctttaaaatttgagatgtgtttggtgacctaacaaatggccccccatggagaattttccatgtgcacttgagaaggctgtgtaccccactgtttgggtggggtgacctatatgtctgttaggtctgcttggtttttgtgttgctgaagtcctgtttccttactgatcttgtctagatgttctatccattactcaaagtgtggtaccgaagcctccaactcttacggttgactcgactatttctcccttcagttctgtccgtttttgctttgcgtattttgggggctcttttgacgatacccatgcctctcagggatcatggatgccatggatgctctccccagagcagcatgtccaggtcaagagtgtggctccggggctcccaacagtctcttggggtctactcgtggctctagaagcagccccgggaacactgtggtgcccccaggcattctgcactcatcctccccttcacccaccacctccaacctgccagcaagtcccattagctctagccccccgagaacgtacctttccctcctgcctcggtggcctcctcaggcacagggtcccctctgccaccaggctctggccatgtggcctcctgttttctgaacatgttggctgctcctgcctcactgagtgttgctcctccgtgggcgccctccctccaggtccctgcgtgtctgagatgctgtgagcaccacctctagggtaagttcatgctcactccctatcccagcccctctcgggagctaccctgttttgttctatcacatagggaaatgatctcagaggtgtctcctacaacacagttcattcacgcgacacccgggacacctgcacagaaggcacttgctgaggacttgctgcgtgggtggagtccgtgtcctccaccatgtccccttcagtgaccttgagaagaatgggtgcctaggcagacaagattcagatgctgcctgacccctgatctcaggagaccctcaaatccgtgccccaaatatcttctaagagcctgcctgcaacaaagtggggggcctcttggtcctggaaaggctgggaagccaaggcttgggaagaacaacacaggaagattcgacaggggaacctcctgccagcaactctccactaagacccagcggagggaagcaagaagacagaacgcgtgcctgtggacagagctcttctagaatcctaacccgctggccacgtgaggtgccgcctgccctctgccccaatccaggcctccacaccctgcaccttgctgggatggagggcctctcctctcaggagacgttggaacttgctgtccagctggcttgtgctgccttctccaaagcaggaaatggtttggggtgaaggaacctttaagccacccagccctgcacacagccaatgccagctccacattttccatttcctagactcagcagcccaggagtctggacctgtttggtgtcaaggcagtctggggccacccctcaccccaaacaaggcagtgggtcctcaggggttggtcccgaacaatgcctgggacacactcagggtcagcccccagaggtctgcaaccagagctcaggaggattttaagagcaagctccaggccgggcacggtggctcatgcctgtaatcccagcactttgggaggcctgggcgggtggatcacctgaggtcaggggttcgagaccagcctggccaacatggagaaaccccgtctctactaaaaatacaaaaattagccaggcatggtggtgcatgcctgtaatcccagctactcgggaggctgagtcaggagaatcgcttgaacccaggaggtggagcttgcagtgagcccagatggcgccactgctcttcagcctgggcaacagagggagactctgtctcaaaaaaaaaaaaaaagaaagaaaagaaaagaaaaaagaaagaaacaaaaacaaaaagagcaagctccgaagactcgagcttagtggggaggagcgaggacagaagcaggacataagagccccatttcctcctcctcctccacttttcccaaactagactctactgctgcgaggcgcagggcttcaggatgacaccggggaatgctgggtcagcatccatttcaacaccatgatgacaacatcccagagtaataataaggaagcagaagagaaagaagaccagagggccctttgacttgtctctctggcactgggacagcaggagtgaacagagcaggctcagaaaagatgaagcagccctcccgcggcttgggctgcaggctggtcgggagcgagcactgtgagtgctgatcatgtgccccacgtccctgccggcggggtgggggctggtggcgcaacaagctccccaccggcagccatagggagcttgtgggaagtaactcaattctgtgaggcgcatgagtccctgtcactaaatacaagacagaggggcacatcccatctggaatgggaatgcaggggtgggaagcttgttctttgcctaaggaatgaaacagtgaaaatcatggttgtcacatttattaagaattgccctgtccaaaaaacatgggtcttgtcagactgtctggtgtgtcctcggtgccaaggcggcccagggaaagggacaaagctttcagaagccgactccacagacacaaagacgaacaaggaagaagcaggaaggaatggcactgtttacctggtcccctaggaaag[142 bp omitted]aaaccctgtcactaccaaaaataca[201 bp omitted]caagcggtgtaccagggcctcagtgagtctggcaagttagaaaacctggctggtcatggctggatacctgggatacaaaataaatgatgggccagttcaatgctttttattctgtggcagaggcaaccagctcagaaattcttgtcaaaagggcaggccctgagaaaagcaagtgagaggtggcttccaaagttgaggggtgctgagggtcaaatcctgtgcaggggctggaaggtggggggaagctgtctggccagagggattcattccagaacctccttaagctccctggtgggtctaataaacatatctgaagctcggcaggtccttggcagggagcttcagtccagtacaattccaccaggctcgcagtgagtgcccagagctgcctgctttctccacatcaaacagagaacttaatcgggatgtggtttggtcttcttcagactgtcttctgaaagccaggaagtctgatatatagagactttttcctggtactgactcttccatggccagggttctgacgagactaaaagatggtaagggccctttacaagtaacaattcagcgcaccactgtttatcatcaagaactctcagctttatattccccccagggaccatggaataaagtgaacagactagatgtgacggatgagacctgccgggtaacatgggggtggtttcctgaacaccagtgtgatacagagtgagacccaaatttcttctgatgcaaacgaaaacggtctgagttcacacacacgaaaaaggctcaggccaagaagcagttggcatcgggttccatctgacttgatctatggcctaactaacctaaaataaagtttactttgctctgagcaggcccgattagtagagaaagccaattaacaggagcccttagcaaccagtcagggtgttctctgcagacagcctgagggaagagccctggtcagctcagagctgtcacaaggggcttgacaatggctctcctggggctcctgaaagtgggtgtccaaaagttacgagtgctaaaactacaaggtgcatgttatgcacatggccaccagagctacattggaacatttacatactgctctatgcagcctccaatcctggctctcccacggtgcccacaagctcatcccaaggctccctgccatacagcttcaccttccacctgccagtgtgggggactgcttgaatttctcaggatcagagcctcagacccaaagtccatgagaatcaggatgctgagatctacctgggctggccaggccaaagagatgaacatgtggacgaggtgaggcccctccagacactccaacatgggcctctgtgagaagtacgcagggcacagaacagcgcgtgtgctcttgaagagcacctgctgtcacaaaaactctgtgatgcacttgtttgctactctcattctagaacctgtcacctctgcagctggagagtcctatgtgggctgcatttttcaaacccaggcacctgcagaaggcctctgggggggaccctaaagaccatctgttcccagacagctgaagacggaaacctgagaacaccatttcctgtgctctcaaagaccagaggtgcagtaactcaccatacctgactcaggagaagtttccggcagccactctgccaacaaaagaaggacgcagccacctcctaattcttgctctggcggcagtcacgtgcgctcatgggagggctgtactcccagtgcactgtgggtcaagtgcctcctggctggactccttcccgcggctcccgtgtctcactaccccaaacccacttttgtgccacgaaggccactactgccgttacctcccccacacccatagcctatggcacaagtaaagactgttgcttctttttccatcacacactgactcctccaaaatgttaacacaggactccaacccacccctggctgaacagtgcttcctaagtgtcctgaggtttggtggctgtagctgaatgttaacagtttccttaaaaaccggggactgttgtgtgctagaaagaacgctgaggtccgggataaggtttgggaccgtaccagcctggaaggctgcctggtgctcaggcggtagagctgggtcccttcttttcttgttaagagtcctttttccctgtcctgagaataggggtcttctgtcatgagttacctacaggatggagttttcaatcctgaatgtaggataatgtttacctttcccaatttatcaaacttcaaaaacccaagacatttcttgttcttgagagttcacaatcttctccacctataatcttcaaaaggcttcttaatacaaagataaagggctcaggggattccttctgggttcaaaggaagagtcttttcttcttcctgctttgattgaagacaatcagttcactgccttaaccacagtccaaacacaatcagtcttgcaaagcaatctgtgttggagagtgcctcttcctagatatcaaaggaagccttagcttcttgggtttctaagacgctaaacttgaatgcccgcattcagggaaacaagaaggaaaaatggaaggagggtgaaggggtcaaattaggtttggaaggttctacttcacatgactcaattcctcctgacccctcgtgtcttttttgggaaacaggattcacctcttgctgtgggtatatattcccacggcaatttagaaaaggctaaaaggggattcgatcttccctgacttttcagcagcatgaattaaagcgagctggaagaaatccttgtcatcttttaagttaccattagctgcttacaattagctagggccaggatctgagggacccgaagggaaagtggctggtctgggttgggctccccctgggcggtaggagtgccgggtaggtgtggacttacccctgccagttctcgcggaaaaggaggaagctgggcttcaggagcgggaggcggaggagtgctggctgaggcgccagcaggggcaggaggttctagggcatgctcgccagctgactcggggtgacccgtgccatggtggggggcctcagcctccccccgaggctcctctcccgaatccgacaagtttttttgctctgcaggggactgggagcaaaaaagacaattttccttcaatgtgaataaaggctgcatcacacagcaggaagggcgggcaggggtcagaggctggagctggctcagcttgcagcagctcctgcgcctgggaggaagatggggagagcaggcacctgcttctgggttctgctcaacaaaaccggctctccggctgacggaagggaagtgagagtggactaggtgccatgtgactttgcagggagctctacagtgtatgagaagcaggaccctcgtttccaaaactatgggctgcctggcaaggagctacttggcttacgggccttggtgatcaagggacagggacgatcatgcaaaatattaaaaccccttcaggatctcaaaaatactgaagtgggggagctggccatcagcaccatttctgtgctttaggaaagagggaggtggctggaaccccaaagttagggagaaaccagggaggccagggtcaagggcttctgcctctcgccggggtcaagggcttctgcctctcactacagttcttctagcactttccatttgttctgcttacacccaggatccagaaagtgctttcccacctcggtgagtgcaagtgtggggtgacatggacactgagagctggtttttgcatcagtggcaggcgggtagttcagatgaaggaggggggcaaatccacagagcccctcagcctaggattctcccaggtgcatcctcaacaccccaggcaagggctcatttggaaagctgccaaggtgagagcagccggttccagaagtcttcctccccacagtacaacacccagcatcctttaaggtggttcctgggactccagcagggcttccatgggctgagagctctgtggccgtaactccaagacttttcttgagaaatgggttaaacacctggtgtcctaaaacagactccagtccccaaacctccctcttggcatcgtccaacgacatggagccatttctcgcactcggtgacctacatgactacagggctgccccgtctccccgtggacgtggctgtgcttcttcttgggtgtgaagtggctgacctctttagacggggtttgggcactacttaaaaagcagtgatccgggaggaggaaaggagctacagaaagaggatgtaagagaatgtacacaaattcctaggaaagcaaaagcaatcttcactcaaaagtaatcaaggggacactgtcgcctcttcgtatccagggcagagccacggaccagccgctctctaaacctggctctctaaacctgcacagggcaccgtggttcgtccagccacccatgtctgttgctacttgatggtgagagacttaacacctcacaagagaaaaattaaacccagagctctgtgggggactgcctatctctaattagaaccacttgaattttttgtaatccctgcttttgaaatgtaaatattcaaacatcctcatggtaattcaaaatgctaaacaggaggaccaagaagtaagtcataaacatggaaaccaagacatcaaaacaggatcaaattcgtcatctttggttaagatgaatgatttgtataagtgttgagaagtattacatcacttcctctctcagatgggagaattaacaatgtcattccagcattttctactcaggtcctagcatttctcctgggcaggaatcgtaagctctaaagaactaaggtgaagcctggagtttttcaacatgtctggtaaaatcagacatcaagagtttgccagcctttgacctcatcctaaaatacacatggctggcaaaaaccacgtgcaccagggctaagctcatcacaccaacggtaagcctcaaaagcaggtctaaacaccctacgaccacattttcagtgatactgtactttctgctaaatagcatttctgtaactgccttctttttaccaaatggccattattctgctagtacaacctcaaagcctccccacttcagattaacaaatgctctggagagagagcaactgaaagaaatgtttagtctttacaaagaatggaacagcctacataaggatatttaaattctcttcacattaaaaagaaaaagaaagaactctatctccatccaaggcagttaagaaagaaaggtttcatttttgccccggaaacaatggtgcatgtaaacgcaggcgtttcgatgagacagcacgcccctccccaggaagcgcaggcatgggaagggagtaacatccctgtgctgccaatctgaccatggcttcgttttaggccctaggactacaattaaaaccacacatggctttttctatcctggaacgataggatttggcaacctcacccaaggctaagtgatgccaccggcacccacacgcaggccacggtcccaatccgtagtgtgctgaagtgcaatctgacacatcaacgggacccacagaaaaccgctgtgtggctttgccactgaacaaaaacaaaaaattcctcggctggcagcttcatgtctttcttttcaactccaaatcatgctgaatcatgattcagcaataaaacctgagcataaagagctgtctcctttgaatggcgtgagagggatggtggagacgaaggggctcttttacttgcaccccatcgggtgtggtctgagatctcgtttactgaaaggtaagtcagctggtcccacagttgatgagacttcttgatctttgaggatcaagaagttgttaaagtcactataagtgacatctgaggggcaattaggacaatttaaaacatggactatatactggaggatattactgaattaacattttcgtaggagtaacatggtggtaaggccatgcaggagaatggcctcatccctatgagacacccgtggaagaatttagggcagaaatgtcacatgggcttaacttccggtatgagaggtgagggcagcaatgctaacagagagggcaggggcaggatacccaagtgtttgcagtgtcactcttttccaaggatttgaaaattttcagaataaaatgttgaagcaaaaagggtggggcggggggaacctcctcggaaaaacaatggcagcagctctaaaagctcggtcccagctcggcttctggagagcaagacagggatgggttgatggcctccgcaagagagaatgaaaccataaaggctctcaaaccctcacttctgacacacactgcagctgctccctgcaggccctgaaccagaaagccaaggagaaacaaagccagccgcccgccctgtgtgtttactttccacctcactccccagtggcagaaaggactctagggccatgtggacactgtcctccgacagcgaagcaaacacgctcctcctgctcctggcctcagcacagaggtttcccacatgcctcttcagcgacggtgccacagaagtgcgagtgacagaagtgggcagcccaactcccaaggctggagggcagttatttttagaagtccatttagaattggctgtgagccaatattttgataagaactatacttggcattttatttttaatttttatttttaattttttttgagatggagtctcactctgtcgcccaggctggagtgcagtggtgcgatctcagctcactgtaacctccagtcccgggttcaagcgattctcctgcctcagcctcctgagtagctgggattacaggcatctgccaccacagtagagatggggt[131 bp omitted]ctagccttctggttcaactccaacatgtttatgtaattggcatagaccccttgaaggtcatacatgcaaattagcctgcaaatcacaaagcaacaaaaccccctcagctgtgaaaacagtactgacacagcagctagtgactttaaaagcactttaaattcatctgagcaaatattacacattactgttccatcttgctggttgccttaaagtcttcagatttaaagaattactgattcctattgtttgttttaaaccaggggttggcaaactgttttctgcaaagggtcagatactaaatatcttaaggctctgcaagccacacggtctctgtccaaatactactgctgtagcagccacaggcaaccgcaaaggggatagttgtggctctgttcttgttggctcatgcccacaatcccagcactttgggaggctgaggcaggagaaatgattaaagccataagttcgagaccagcttgggcaacacagcaagacaccatctctaaaaaaaatttttttttttcaaattagccaggtgtggtggtggtgcctgtagtcccagctactcagaaggctgaggcgggagattgcttgaagccaggagttcaagactgcagtgaattatgatcacgatcctgcactccagcctaggccaaagagtgaggctccgtctctcaaagataaaaacataaacaaataaaacaacagcaaaaaacaaaacaaaaaaacacaggtggcagtgctgtgccttaatttgctaacctttgttttaaactaaaaatggttcaaaagataataaaatgcaaaattctagaaaatcctgattttactgaacacctgaggaatgactataacatctccaacatagctctaacacacccaactcctgaggcttcactattctctaaaactagagaaatgcaccagtcctttcgtactgatggaacctccaaaagacaaatcataaagccacgtcattaagctgtacttgtcagggcccaagggagaggagatagcagaggcagatttatcttggaaatacctggagaaccaaaacaaaactagaagaaagttttcatgtttctggattgcttcttcagcaaaaaaagtaacaatgggaaagtttcatgagttaaagttacaagcttagtagataagtccaggctaacacacaggtatcctgggaggggtgtgctgggggaggtttagaacaaccattttcccctcctccccaacccctacaaacacacacacccgatccccacagagcacttcaacattgctcaggaaaaccgggccacatcaagataaatgctggctttgggacaggacctaagaccagcagctgagtcccagatcatgagagcggcttccagcctgggagccggtcacctgtgaggggacagaagccacaggagaatggagttgatgagattctcaaatcctgttattaccaacaagatgcagacatcctcaaaatgcaccgaattcagcacaacacttggtcactctaaaatgttgcagcgggtatgaggtggggagtgccgccgctgggcatcagtgggactgctgcagcgggtatgaggtggggagtgccgccgctgggcatcagtgggactgttgcagcgggtatgaggtggggagtgccgtcgctgggcatcagtggggagggaccacacattatttctggataaacagtgagggtccccatgcaagctgaggagtcactgccacacagcaccaactaacttctgacaaaactctgaccatccacaccgatctgtcagggagagaagccgatggcttcaaggtaaatagcacccatcgttgtcttatcacagaaccctgttgccacaccaatcagaccttccacaggctgccagctcatcgccatgaatcaggcgaggtacttccaaccacactgcgacccagacaccctgaatccaagggagaagcagcctcatggacacgggataaatatataatgcaaacaaatgaacaattactctaaatgcacgtacgcccagctcgttagggccaataaatccaggcttaaaggtcttgtttcccctgtaaccaccattgctctcctccttcccctccctccctccctccctgactccctccccaccttccctcctccctttgccccctactgtccctctgctgttggttttcctaaggtacagtggcatttctcaaacaaatcatcaggaattaggaagaagctttctaataccgtttcaacaaactgtactctctgagccctttccacaacagacccatcctaacctctctccacggtaacctaaagccaccaagccttttccctccaagctcaacgtgaaagtgtaaaggcctctgcttaggtctccccgtctgtgggcagaagtggccttggcaatgcgacctggaaaagagactctcagtaaagagagaacaaattagagtaacgaagtgaagagagaacgtaccggccccttaccttttgtcctttatccttctgaaacacaaagacgggcggagcaatggcaggcttttctgcaaaaagaaaaattagtttttttccccccaacactatatgcatacagtaaacaaagctacacttgtttgtaatatgttaaacatatatataaatgaaactagtaactccagagaacatcaaatcacttagaacagcgtcttgactcggatgcctggaggcacaggtgtgctgggtttgtgaaatgcacccagaatgatgtgacgtgtgccctctgctgtatgcatttatcatcaataaggagttttcaagactcactgagagcgggcgtgtaaatgggagtgggagagcagcggagagtgtggcagcgctatttggcgccatgaactgtgaccttgcaggaatgtggcacctcctgaattgcaaatgttagagactaatttagctttttaaagtttacaggccagagggcaaaaaaaagggccaccgctcgcgctgtttgcagacagttctggtagaagaatcctaacgctcaacctggatctctaagtgagtgctggttgggaggaaaggatgtctggagttgctagaggcctgagagtccatcttgcacagcggctgaaggaagaaacactctggggtgttctgtcacttgatgggacaagagcaaggcggcctgtaatgcccacgcaacaccatctgtctcctacccaggggcagccagatccacagccctgtgccactcagccccggagtgggtggcagcccaggaggccctgctgcccgcacaggaagcacagatgaggactgcctcgaccccacgaggaggcgcagaccacacctgcctcatggccttgggcctgcatgcactttgatgaactctgggggtgctcccagggcctctttcaccattcagggcactgagggcctagcgtggaggccaagcaagagcagctgtgactctggtgaatgcctgctgtgggctgcgggctgcgcactggtgcctccgcgttgagcagggtttgggaagagccctgccttcgcaggccccccgaccccggtcgtggggagccaggcattacccaggaagcatgtgctgcccatgatcacgacgaaggcactctgcttgggcattgacctggtctgctctggagtccaggggaggtccctgagaagagggggctgtgctggggtctcaagaagagctggaagggagagcagcagcagcttgaagtcacagcttgcggggtgatggggccaggggcaggcggtgggcatgctgacttgctggggaaatgtcataaaaggcaaggggatgcctggggttggtttaggttgaaagcaaacagtttggggaagggagtgagagtggctgtggggagaccaggtgggtagtgactgaggtggagagaaagggacagcaccaagatgaccaaacagacaccatcccactcctgcagacgcaggacagactctggtcttgaccttggggcatcagtccacagccaggcagcccactgatggtgacattccccccaccatgctccccgaagcctcggcacaccagggtctgattcaccgtgtacagccaaggcaaacactggagtgagtggcgtgcgcgagacccaggggctacaagggagcaggggaggtcagaggggtctccaaccagacttccaggtttccctaagcagacttcttgccaacacagcacacaggtgctgcttgacaaacgtgaatgaatgcacctatgccaggcaataaatgatgtcaaaggaatgctgggggactctgggacagagcagcagcgtatccacaccatgtgtgccaccaggatcctagaggtcttccggtgccacgcctgtaccccacaagcccagccctgacctctgcatttgcctccctgccagctgccaggtgacaagatgcacaggaaggagccagggtttgagccagcttggcactctccaaccccattttctttagggagctacccacccctcgtccccctgtcccccagttcagatggagccaagctcagccccagctccaggcctgacaagaagagtcccgcatgcatcgtctaacacatggcacatgaacaaggccaggcctttcgctggagatcctggggctgctgagctgctggtgaatgaccctgaggctgccagcaatcccatgtcaccgagaggggccttggaccagagccaaccagaggtagcagagtcacagagggagggggaagactaaatctggcctgtgttcggccctgagtcaagcttggcccaaagctaactctgcccccagacttttcagtgaagccaatcagtgctgatttttgcttaagccagtttgagctcgatttctgccccttgtcgctaacagactctggcctgagagaggcgcggtccagccactgcagactgaattacacacatgctgcactccagcatctgtggaagagaccttggacaggcctcaaagtgacgctaagatgctttctttctcttcacagcaagtgtcactgcctgatccactccatattgatgggtttatggtctgtctcacccattaagatataaactccataagatccgagactgctttgttcccctgggtaccccatggcctgagaacagtacttggcacactttatggattcaacaaacacttcatgaagggggagggaaggaggacattagtgaaaatgtgaggcgaagacacttggtgccaggctagtaaggaagggctagaagagagagaaccatttggatgggagaggagtgcgcgctggtgttgagaaccgtgtcggtggatctgcaggtgcacggaagggactgcagctatttgagtaactatgggaggcctgggcaggctgtggtgccaaggtgctgcccggagccttctggacacacggcagggctgaggggcatgggccaggagagggcccctctgatggagcaaccctgtcctgtgcctggacatgtgacccagctggagacagagggaggctatggaaggggacgtgagggtcaagctctgaaaggagccacccagagaacagaaagccagggtggagtccaatcagatcctccacaattgcctcccatctcttgttcctgtacccacccctgccaccattcagccctcctttccttctctgcctctactctcactcccttagatctggcctccacagagcagccagaagcactatc[131 bp omitted]aaaccctgtctctactaaaaatacaaaaaattagccgggcgtggtggcaggtgcctttagtcccagcaactcgggaggctgagcttgcagtgagccaaggttgcgccactgcactccagcctgggtgacagagcgagattccatctcaaaacaaaacaaaacaaaacaaaacaaaaactgcagtgtcggccgggcacagtggctcatgcctgtaatcccagcattttgggaggccgaggcgggaggatcacctgaggtcgggagttcgagaccagcctgatcaacatggagaaaccccttctctactaaaaatacaaaaactgagccaggcgtggtggcgcaacctgtaagcccagctactcaagaggctgaggcaggagaatcacttgaacctgggacgcagaggttgcagtgagctgagatggtgccattgcactccagcctgggcaacaagagtgaaactctgtctcaaaacaaaacaaaacaaaacaaaacaaaacaaaactgcagtgtctcccacagactagaggctgagcaccttgagacaggccacatccagccactcaccctccacctcccactgtggtggcactgaaaagcccgctgtcgctgcacgtcccacacttagggtgcacttctggacttctgcttggtttagtcccactaccaagagcgcgtggttccccttgttttccatggccagtgcttactcctgcacagacaccatctccttcaggaagctcccactgtgagaggcgtgcctgccctgctgcactccctcccgagcaggccttatatcctgccacggggcacgcggagaccacggccacagcagctgaaacagcctatcacccagcgtacaccgcatcaacaccctgcaatgagtgtttgaactaggccctctctctgtcattcatctacacaacaccagctgctacgtactcacaaatatttactaagccctcattctgtgcagggcgccacaggaagagtggagaacaggaagctgagggcagacgcttcaggagaaaacatctgactgaaagggaggggcgtgtttgcacttggtgaccaggcactgtggagccctggcactcccagaggggtgtgtggtgacagcatctacccctagatgtaagttctagaaagtggggcctcgtctgttccgtttctctctgtattctcagtgccaaacacagagcctcacacttaacaggcactcaaccggcagttagagggtgaatgaaatgtcacacgccgcaaggacaaggacccagggagccatggtcagggctctccagaggaacggaaccaagaggatacagcaataggagatgaacttggcccatctcggcccattgggacccctgctgatggcaggtctggcattcatgactgacccagccactgcactaacatgtagaaatgagctttagtcacatctgcacccaaaacacagagcgtcagttactcacgctgcatttctactcaggccaaaggttgatcaactgcaaatcagcacggctatcgcaaacagacaagacacacaagccccattccaggcaggaccgccccactgcccccgaccaccagacacacgggttgctgttcgtagccattccctatcaccaggctgattctggctataccagtgaggaagcagcgtgtgaacaccgctacctccaactcaagtttggggaatggacaggcggccagaagtagggaggcttcaacaacctgcttcaattcctagcccagcttttctttcacaggtcaagggaagatcaccactgcagatttctagagacccaccatgaagacctttaatattaaaataggagtcaaatgcagactatttgacccagaatctgtcaaccaagtggttgggttttttgtttttgtttttggtcctgtaacatgctccctgttgaaacctagtttgtaaaaaatgcagtctgtctggagattgactttacacatccgtatattaagagattagaaaaccaatacgaggcacagtggctcatgtttgtaatcccagcacttgggagggtgacgagggaggatcacttgagcccaggagttgaagacctgtctgggcaacataatgagaccctatttctacaaaaaacaaacaaatagccaggcatggtggcgcactcctgtagtcccagctacttgggaggccgaggtgggaggactgcttgagcccaggagttagaggctgcagtgagccatgatcgtgccactgcactccaggctgggtgacagagtgagaccttgtctcaaaaacagagagaaaggaaagaaactcatttgaccagacgcttctcaaagttatttgactagggagtcccccccatttccagggacatccacaatgaggcctgagaatgacgtttcaaggaccactgtggacaacactggtgtgtgaagcgggggagattctgagcccctcttccttggacacaagtcacctcaaacaatgtgtgaagtgctctggcccaccacatacttcttctctggcctcaccatggccttcaggggcactgtgcaccaagtcccacatggctgctgctgaattcagaaccctcgtcccatctagcatcctctaccctgcgaacctcctcagctcacatgcccagacagcacccagcctgagcccaacaattgtgatcctgtgatgatcacagacccaggccagggagagtcccctgctgccccctggtaccccaggaaaacagcaagggaagatggcctggccagaaactgaaaggagtgagcccctgctggcatccgggcccacggtgctggctctccctcccatcccctgctaccctcaacccacttgtgaggctccgatgcaaaatgggaccagctgggattccccaggacagggccggtgtcctggtcctggtctttgcagccccagcgatgagcacagacaggctaagaagcaagccagccccagcacaggaagcttggccatctctgctctcctttccaacttctgccagatgttgggaaccccttagacctgcttggcctgcccccccacctccacccagtcatcctcacgtggctatggctgtcagggtgctctgtcccacctagttgagcctgggaaccactctgccagctgcacagaggatgaaaagattcaatcctaatattccctcagcaattccacacatcccagcacccactgtgcactaagcactgcgtcggcctctggagacacgtccctgtctgtctagagcacccatcacaccttatctgaacatatgacacaggggaggcacagcaggccctgggaacatagagctggggcttccaacccagtgaggctgtgaagggagtgaatcagggaatgctgctgggagaggggctgtctggacagaaggacaagcagcatttggccacatgaccgggaagcacacggcagcagagtgaggagtgctggaggaaccaggtcagggtggcacatgcagtgggcctagtactgtgctaatgcttgggacacgccttggggacagactggaaaacagggcagcctgggggaagaggagctaagtggaggtggtagggtgggggggggggtggcacggtggggggtcacctccgcccttccctggggtctgaggtctgcacatttatacctgcatgtgtcagtgtagaagctcctaggaaggaaactccaatcaaattgaagcagttcctatgacagcttttttgaggaaagagccaaagatctctgcgatgaaggtggggatcctggtggaagggggtctcttcccctggtgggatacaggcttcctcctgaccctagaggaactgttctccttgcagggggcagtaggtctctgaggaggtggggggcttgaggaggtgggcccttcctctaaagcagaaatgaccaatctgggacccaggtggcttgggggtgtgtgtgcgaagtccataaaaccctcaccctgaaccctgatgaagtcacctctgtaatttggtggacagcatctttatctagggaaagggcccagatactgcctcttcaaagagtaaggagggtgaaaggaggagggcggtttcaacagcccacatgtgagagttaaatagcaggcttcctggtagcacctctacaagcagcctccagggaccaggactcaaaaaggttttatctgtattttttctgccaagagactgactggtggcaaaactttgatgacaaaatgaattctgtgtctatttcagaggcagcaaggaggggagagggtgctgtagagccccttgggacagggtgggtggtgggggcttcccagacttaaggaaaggagtgaggtctctgcagcctactgcaagcaaggaaaggagaaagcaaggagctgggctgaaccccagcggtggcccaggggagaaaggtgagtttcccaacgctccaggtgaagaagggttgtagaatcctgttttacctcttagacttatcttagtttctgccatgatatgcacagcaaaggcatccacaaatggggtctcccagacgcgtgatggtttcatatacgtggccagcgttcttcgagcacttctttatgtgttaggttttatctgcatcatgtcacctaatctccacaaccaccttaggaggtggcttacaccaacatcctttcacaggaaaggaaacggataatcaggtcaagcgacctgtcggaggtgggcccgggtcttcgggccaggtgggccgactctgaagccccggcccatgctcctgagtgccacgctccactccgctgctggccaagaactacgtgtgcaaaagggaggagttacctggactccagtttgcttcctctcaccttttctgtgcaggtaggcctcagagctacaacacatacactcttccctttagagaaatgacagcaggaataaagtagctgtcagttgctgttctggataagcacctatggaggagcacgaaccaaactagggggctagtcatgagttccggggtcagtgaaaggcttcccacaggtcacatgaccacctgcctcagccaacacagtgtgtgattatcccaatggctgatccccgacaagactgcaatcctttaaggttgtcaagacaaggatcaaagacacattccaaggcacacactcaatggtgacacaagctgctttctgtcttcatctgtcaaatgttcggccctggaatgctttgcgtaatatattcagaatctaagctgacaacacacacactctcgcctccgcctctctcctcttccgtataaactttctttcctcactgctgcagagaataatttacaaagaagcaagggcagccctgccttacagtaagctttgcttccccaccagcccatggctgtctccagcctgtcatggaggatctcccgctaaaactaaatagaagaaactacgtaggcctgggaaaacacatataagagagaatctggaatatctttgctttttctgtttattcgcctcctgactgatgactccaatacctgccaagaaaatgccctcatctagaaagcaattgagaactcctgaccaaactgtcagcaaggtacttgcataaaattagctttaatcctgggctgatatgtcttaatcttcttacctgtgaaaaaaatatggaaagcatctcgccaacacaaataacagtctattaaaatgtggcaactcctgtaatctggtgacacgatcacaacccttcaagtcatttattttttcagaaattattataaacagttctgtgccacagcacaaaggtaaatctgtcactgacgtgtcaggtctgtcctccaactgattctttggtacggaatggaactgatctcaaacatgcagttgctaggtgatgcctctgcggatctccgtgtatagcatgctcgggttctccagcccagctagtggaaggcggtgggaccctggatgactccgttcttttctcaatactcgaatatatttctataactttcaactggtctcatggagattatggggacacactttttggagctgatgatatcctacattttatgtacttctttctggaatgctcatcatcttggcattaccttcaactaccgaactccaagccaacttccaaccactctcatctcaccaccagatacttacacttccaacaagcattgcaggggcaacaggcatttgttaaaaggcctttactggactccgaggtaggtactttacatatctagtctcattcatcatagacgcatccccatgacatcctcctcatatcccactccaccccatgagggccaagccacattctgccttctttatttctacctttatcagccctgcagccaaacccttctaagcttccactcctgcgccacccagaccgtaagccccggggggcagaacttgcacttctgaacagaaaccccataaagttatacaaagtcagcaactctgcctacaactgtatggatggctgggttcagtggctcatgcctgtaatcccagcacgttgggaggccgaggcatgtggatcacttgaggaaaggagtttgagaccagcctgggcaacatggtgaaatcgtgtctctacccaaaatacaaaaattagctgggcctggtgggatatgtaatcccagctactcgggaggctgagacccaagcatcacttgaacccaggaggtggaggttgcagtgagctgagatagcaccactgcactccagcctgggcgacagagtgagactctgtctccaaaaaaaaagaaaagaaagaaaaaagaaaaaactgcgtggagagatggaggatccagctttaacggcacttttctgttccgccactaggtggtgtgacaccaacacagctgaggcaacatgcaagtggctgaagactcgggaaagttccagtagagacaacaggaatcccctcctctctacacggaagcttacaggaaggaaatccaagaactacagaatttatgctgaggcagcagagcaaaactgatgatactggagagcgcgggctctggtctttgtgtgtgttcaaacctgccctggccacttacttgcggttgggatcccagataagacaatgtacctctggcacaatgtcttcatttgcatatcagggctgttatttcaccccaggcagcttcggcaaggatgaaatgaaatgctgcacatgccgtgtttggggaagtggttggcacacaggatgattccacactggcactggtagcattattatgctcggaagattgcaaacatattgatgccaccttaaagcataggccttggattcaaggacagctgccagtgcccggcaacgacaaatgcgtcagagtctgaccccttttagggggtggaatggttggatccaagagctgcctggacgcctgggacactcaaggcaaacgctcaggtgctcggaatgcctgagcccttctgaggtcacaggaaacaggtgggatctgaaggcaggccgagccgagcagccaagccttgctctcaccagcaggatctaccaagcacagacttgtgctaggcaccgagcttgccactggagacaggaaagaaatggcagacaaggccgcagctctctactgggaaagagaaaacaaacaagtacctgctgtgtgcagagataactgggtagttctggagctgggtgctgcagagaaaataccacaggatggtgggagagagtgagtgaatgggtaaggcctcgctgaagctcacacatgaagggtgagcagggatgagccaggtgaaggcaggggatcccaggcagaggggaccccaagtcaaaggttctaaggaaaggaagagcctggaggcccatgtttggaggggaggagaacgggaagggctgggtggagcccacaggacgttcagccttgcaggccatgctgacaaatctggatttatccagtgtaaaggttggggcccaggctctggactcttaggacccagtggccatcaccatcaatgctgcaaaacatcctctctcctctgagcagagggtaactgcctgttttctcaccctctcccccagagaaaggcaagttctcaaggaccgtttccactcacgctctgctctcacagatgcaacgcaggaattaattctgggtaaataagttcccaaaattctctgtggcaaacctgggggagtttaatttagcaaaggcattttaaacttactgcaaaaggcaaggcctgccttctaaacatgtgtatggagtaactactactgtctctagaatttcctccctttctttgaacaccataaacagcgacagcgaaatgcagtgccctacgcgggtcagttttcaggggtgaacgagtgcccattacctagagtttactgactcaccgggaaggacaagcatgaactcctagactccatggctggagacaggcgcactggccctagccagccctacctgcttccatggcctcgggcttcagcccctgtgaaatggtgcagccaggactcaggcatccctgaaggttcttcccagcccttacattctgtcaggtcctcaccctggaccagaggcagtgttaaaggtcaaggaaaagactgttcttcctgaagagggatatgatgtccattgaggcctactcagctgccaaaaggccagaatagaaaaataaggttgggaggaagggccttaaactctagctggcaattaatttattcctgggtaggttcctttgatcctatgaccagtggttctcacccaggagtaacttcatctccctggagacactggtcaaaatctggagacattgtgactgtcatgtttgtgggggtgtggaggaaactgttacagacatctagtggatggagaccagggatgctgaccaacatcctaggaggctcagaacagtgccctaccagcaagtgacccaagtccaaatgtcaactgagctgagggcaagaaaccttgcattaatcttgggcaaaaaaattgagctggatctctaactcacattatacaccaaaataaatccccaatagattagatggcacaaaccagggtgaccccccaccctggcttctgggattcaccgcctctctccctccccactcagactgtggctttaaatgtgtacaggctcctacgacctcagtaggttagataactatggaacacaaagtctcttgggtgtcaatgaaatcccataacccaatggttctcaagtgggggcaattctgacattaaggggacactggacagtgtctggagaccttttatcttctcatgactgggagtggatgggtgggatgactgggtgctatggcatcacatgagtagaggctagaggggctacccaacatcctccaaagcacaagatggccaccaccagccccaatgtcaagaatactgaggtggaaaaaccctggtataactcacagggtgctttctctctactcaggcatccaattaggagaatcacagctagaagtaactgacatgtatctccacattccagtaggtcaattaccagaagtatattctctctcacaccacaatcctcagacttgcgtatcatcgttcccattttacagatgcaagagctaaggtcagacaacttgcccatgtttctagggcagaaggcaagacacaaaccaaggacagccaatccaggtgcttccaaccatgccacaagttgccaatgggaacctgctggtcagctctggtttagaattctcccgatgttggcaaggcagcggagaaacccacactgtacactgaggctctgctagcacatgccagtggttctcaaatttcctggtctcgggacccttttccacgcttgtcaatgactgaacatccccaagagcttttggaaatgtgggatgtagctactactgacaccatattagaaatgaaacctaagacaatttcaaaatacttaagattataataaactccagaaaggtttagttaaataacatatttttatgaaaaataagtatttaaaaaaatctgagaagagtggcattattttacattttgacaaatgtctttaacgtctgacttaatagaagatagctgaattctctctcttttttttttattaaagagaggggctttgttgcccaggctggctttgaactcctgggctcaagagatcctcccacctcagcctcccaagtagctgggactgcaggtgtttgccactgtgcccggcctgaattctcttatctgcttctatagttcatctgttggcatatcacacatccaataacctctggaaaaaaactccactgtccattttcaagtgaataagagtgaaaaaagagcagatagtgtctttgtgttgttatgaaatagttttgaacttgcagtccccttgaaaaggtcttggggactgcagggccccggaccatctttgagaactgctgccatatgctatctgagttctagcattccaaggacactaaatcctaaattacagaccatgaggtgctttatgctaaggttctagctaaagagcactctaagtgtagagaatgcagagtctaggagtctgtataataggattgaaacccaaataccaaccaaggtcacaggcactggaagagaaggaagtgggctaggccccaagtaacatggcggagaccacaatatccaatctaatctatccacaggcgcagctgttccttagcactgaaaaatcactgctgtgcaagaatgcaggccaagggtggttgctgttttctgagagaaatcagaaatacaatttttttcccctctgaaatctcagaattttaagtgttggctcctaattacaaacaaaaacctaaatgggccaaattaaatatgtctgcttgcccttcaggcaagtttgcaacttctgcctgtggttttcaactctggcttcatgttgttaaacatctgtggagctctttaaaaccacagacaccctagaactcctggaaccatctccaatggtgcagcccaggcagcagttttgattttccctgacaacctccttaaacaagtgtgaagcccatccagggctgagatccatagctagtgctgtgtggcagctctaagtgccaagactactgaggaggaagcaaactgtggacatgtggaaggtggtggtgaggagctttaccctgatgtcccaggccacgttattctctactgcgtagggcagagtcaaacagaacaccgctccaccaggaccccctaaaacaaagaaaacatcaccaccagaccctgaatagataatgatgcaagcccaactgcctcacgattgcttcaaagtaccatggagagctaccaaatgcccagccaagccaataccagccatctcggcagttttgtggtcctctggtaagttttgaggaacggcgctctcttctcagattccccaaatgcatctcaactttccccaaatggccttcgtctcccactacacccaggcctattcactgtctgaactcacgtaggagggcagaattcaaccccccttctccaccccaagctcctccaaatgccactcgaagctcaccccattcctgctgcttctgctcactctgaccacctcagaggaggagcacacaccagacccaggttgaccctaacacctaatgaatgcacgagggtgccgggaaaatcccattttctggtaaacggagaggcaggctgaaggcttgtttgaaacattttgcagaagcccagtgagggcttttctgtctatacgcaggatcctgggcaaaatggaaagtctcttcaaagagtataaagattttgcagcctggataccccttgggtaccatcaggccccttctgctacagatacaggaggcacagtggaggtgaaagcacacattctgctctaagcaaaaatcccagaattagtttttataataaattcacgagaaactttccaaaagttgtttaagataggttccaactatttcagttctagctaaccaataaaaattcagttgcatctcaccctctcaggggctaggttttaagtcaacaaggtgcaagctgagagaagccaaaccaccctcaaaaatctctcgactcatacctggtcaggcttttaaatcagtagttctcaactgaaagcaactctgcccccggggggacactgggacggagacatttccactgtcatgactggcggggatgaggagggggatgtgctattagcatttagtggggtagaggccagggatcctcattaagatcctacagtgcacagcgcaatcgcccacaacagagaattacctggccccagatgtctgtagtgctcaggctgggatccctgagatcactaagtgacaggcaggacagaacttaggaggacccagagcccaggccctgctggtcttctgccaggggctcagcccagggccaactctgagtggggcaggttcacccacacaatggagactttgctgaacccttcagctgaatgtgtccagagcagagtgcactgtagtaaaaacagtgacctgagtgtttattactatgagcagagactggtgctaaacaatgtatgtgcactcattccttcaatgctcacagcaaccacgaggtgggtgtggttaccattattcccattttattggtgtggaaacggggggctcaaagaggttaagaaatttgccccaaatgactcagagtggacagcggagttaaaacacaaacccagctctctgaggaccaaagcctgtgtccccaccatcgataccagtgagtctctcacctgggggcgattctgcagcctccccacccccactccccaggggctgtgtcaggagacttcttctgttgtcatgacgaccccgcgagtgaggggaggtgtgtgctactggcatctagtgagtaggtccaaggatgctaccgtgctgctaaggatcctgcaacgcacaggacagcccctcccgccaaagagagccatcaaaacgtcaactgcaccacacaaaggtgagagccctgcttcacactgtctcccgggtttccaccacgcatgtccacaggccaacagggcctttcatgtcaggatctagaatccaagattccctggagttcaaatgtgctttgctcaccctctttccagtcttctttacctttgccagggacaaaactctgccttcaaatcctgatgtcagcctacaatgcagcataaccctagagacaggatgagtaatgagtctgggaggtatcaatggggaaatgccaagcaggggagacttatccctggatgcaagggtgaaacatgcacacacactgtctgagaggaaaagcactcaggtggactttaaaagtcccagaccacaggaagggctgtgagagttgctgtcaccatccatgaggcgttcaccatggtgacgagggccaacaagatgctttacacaacagaaaacatttcctcgtatacaagcagaggacacctaccctctactactcaaaccagcgggtctcaaccctgcctgcacatgagaatcacctgtgctgccacctgtacagaggcccagaacccacccaacaccagagagaatcggaatctgcagggcgtggcgactgagcatctgcggtttcaggaaagttccccagggggtactgatgcccagccgggtggacagccgctgctcagcctgacacagaggtgggactggcccagagaagagagatggcaaatggatggaggagggactgggtgtgagggtggagcaacttatgatctcagtctggaaaggcagaagccaagagggcatttgactagagcttaaacagcaagaacaaacacgtgaccatggggcagcccctaaagcttcaaaaggcacaggcaaggaggccccactttacacagtgaataacaaattaaacatcctggcaggctgtacaagccaaaaccagaaatggagtgttcaagaaacacacaatgactgattgaaggacggcagggatatatgaggcacaaagtccaccaagatttgatttcctgaggacagttatcccagaactagcgtcagggacaacgtgctaggtgagtgtggcacttactagggaaaaaaagtgaagttcaaaacattccatttctctctttggcccttaccagttcaactatcccatttacaaccaatagctcatgtggacagcatatgctagaaacagtatcccctggaaaagggcaagccataatttcccctttgtgctcaaatgtattcctcacaacagggtcctcactggtgaattcattcattcatgcattcattcattcaaccaatatttcctgtgtacctactctgtgccaggcaccgttctagatgcaagggggcaatcagtgatcataacataaaaatccctgacctcatggagcttacatggggcaaacatgcatgtaatatctagcatgccggattgttaagagctatacaggaaaatcaagcagggtgaacggaatagagaacatggatttaatttgaaataggtggccagagaagctctcattaataaagtaacatatatgagtaaaaaccagaagaagtgagccatgggggtatctgggggaaaactgtttcagttagaggaatcagcaggagaaaaggctaaaagcggggagtgtatgcaacattcaaggaaaactgaaaaagccagagtagttagcacagagcaaggcagcagagagtggcgagagagaaggacagggacatattggggcccactatgggctgagaagttctcagatgggtaagggtggagggaacgggggctaagcattgacggtgttggtggggagaagtggtggtccccctttgggaataattttaaggtagaaatgatagtatttgctgtgcagtatgagaaagagggaaaccaggggtgacttcaaggtttggggccagaagaattcaaagaatggacctgcctaactaactacaatgggtgaaagaccatgggatgggcaggtgtagtgggggagataaggattttgttttggaaacgctctagacttacctatgacacatccaaatggagatgtcgaaatgtgatgctggacatgagtcctgagttcaagaagctatgtgggctcaggatgtaaatacataaaatatgtcatactgattcccacttacccagtccctctgtaactagatctcatgagttggaatgc[151 bp omitted]cccgtctgtactaaaaacacaaaaattagctgggtgtggtggtgcgcgcctgtaatcccagctactcgggaggctgaggcaggagaatcacctgaacccgggaggcggagattgcagtgagccgagatggcgccactgcactccagcctggctacagagctagactccgtcccaaaaaataaaatagaataaaatggccaagaatcagggagagaacctgtgctgctgcctgtacagatgcccagcgcccgcccaacaccacacagaatcagaatctgcagggactgagcacccgtggtctggcatctgaagccaggccatcttggttcacatccctgctccttcccagctgtgtgacacgccttggataagcgacttaaccacgttgactcagtctcctcatcaagtgaatggggctaacagtatctatacctcctaccagggaaaacagtatgtcaagactttgcaccacacctggtaactaccctaaatgctccacaagaccaagcacttcctatcatcattcattcattactgcaattcggtagggaaaaccctccagtcacagggagcaccgaatgggggaatcagagccagacaggtagagagcttgcctgcatttgtgcaactagaaaagggggggagctaaaaataggcctcagaagtcttgaagctacagcgatggcaacacgactatggatggaagcagacatcagccttatggtgccttctcgggggatctggaagtgtaaccttgtcaaaaacactcaggtgggctgtcagcgctccacagaggagggactcgcacggtctcttgtctggaagtgcagcaaaaagggccaaagagcagccagggttttcggcggcccagatcctgcggcggggcctaaatgagggggagacgaagcgccccgaaggatccggggggaactggcgggaagtgggggccgaagttcggggcggggacggggtgaaaacggcctgggcttcctccgtccgcggtgtgcggctggcccgcggaggacgagggcctcacgggcttaggagataggcagccaggccggggaaggggagatgccgggtggcggaggacgagggggcggggagggagcgtggcgcgctccgggccacaaccaggccctaaggtctatttacatccgtggccgaagcactggggccgcgcctcccgcccccttcagccccgagcttggctgcgacgcagaggggccttagggctgcgatcccgatggccacccggctcctctagccagacggctgcagtggctggggttgccgggagtgatgggccgggccggtgagcccggcctgaggggacgcaatagggggcggctgcaaggcccgccacggcgctagcctggagcggacgaaacccttgcactctgcggtgctccccccaagggcttgtggcccctagtcctcccgccgcccgttccccggccgccagccggtccccaacggcgcctcccctaccttcgttcgccaggtccgccattttacttccttaagccctcccacaaggccccgcgccggcccaggctcgcctgctttctgccagaaactcccgcgcgtgcgcacttaacaagccgactccgtgtgaggcggccagctcgcgcctgcgcgctgaatgccgcgcggaggcgagccccggatcgcctgccctgcagagcagcctgccctgacgagccgcgctcctagcacgcacctgcgcacgagccatctcccgcctccttttcccgccgactgagagggcggggaaagggccgggaagggcgcatgcgcagtggcagcgactaaggtttagtgaggcggcaccgcgcggcccgaggcgggtcttgaagcactcgttttcccactcgttttccggggttcccccgcggtgggacagtgagcagttcagggcgccgcagccgaggccttcctccaggtaaatcgccgggcctgcgggggcttcccacacgcgcgggcgggagacgcgttgcctcctacctcagtttacccgccttaggagccggtaccttcggcaaacgctttcctgaaaccacgggggaagtggcgagagggcgcggggtgcttgggattggggggtaaatcagagctcatcggcgggggcgggggtcgtggtcaggctctaggagggggcgcagccctgggacccaggtgctggcgttgggggcggggggagccggcgcgagggactcgacccctcggagctacgagaatcaacttcacaagctcatgggaggggaaccgcgcgcctccaggttacccatctgtaaaatgggaccatcagcctcactcacaaggctcatgggagggtcctggacaccctggagttgttctctactcacctgctatgaatctctcagcaaatccttcggacttggccttgcctccaaaatacagcccagagccacccattgtcacccccaggctgtcaccaccctaggccacatcgtccgtatctatctcatggaagacttggacagcggcctctctgctatcctttgctgcattcttttgaagccccaggcttggttctgcacatggccgcaggctgaggagtctttgaaaaatataatcagccagacgcggtagctcacccctggaatcccagcactgcgggaggccaaggtgggaggatcgcttgagctcagttcaaaaccagcctaggcaacagagcaagaccccatctctacaaaaacacaaaaattacccggatgtggtggtgcaagcctgtggtcccagctacttgggaggctgaggcaggaggatcacttgagcccaggaggttgaggctgcagtgagctgtgacagtgccactgccaccatcctagggacacagcaagaacctcccccatatatatacacatatatactttgtttttatctatatatatacacacagatatatacatacacgtgtgcatatatatgtgtgtgtgtgtatatatatatatatacacatagactgaaaatggaaatatcaaggccactcagtgcttccagagggctctcagctgaacttggaatatcctaaaccttgtattcaggtttatgaagtcccctgaacttggctcccatgccctgctttgttcccccttgctcattgctgttcagccgcgtgggtctttccatccttggagcacaagctcattccaacctaagggtctttgcacttggtcgtctctctgcctgggaccttgtgtttcaggtcttacctaggttggagtcccagctctgcacctttttgagtatgatctaaaagagagcgaggagtactacaatctgtgggccagatatagtctatgagctaaaaatggttcctccctccctccccttgttccctccctccctttccttcccttccctttcttttatttattttggaatctaactctgttgcccacgctggagtgcagtggtacaatttcgactcactacaacctccgcctcccgggttgaagtgattctcctgcctcagccttctgagtagctggcattacagctgtgtactactatacccagctagtttttgtgtttttttgtggagacagggtttcaccatgttggccaggctgctctcgaacttctgacctcaggtgctctgcccaccttggcttcccaaagtgctgggattacaggcatgagccaccgcgcctgccgatttttttacatttttagctggttgggaaaaaaaataccaaaagaagaatatctattgatgtgaaaatggtgtgaaatttacatttcagtgtctgtaaataaagttttatttgaaaacagccaatgcttactcatttatatattgtctctggctacttttgagctgtgacattagagctaatttttttttttaacagaaactttttggccaacaaaacttaaagcatttactgtttgtgtctttacagaaaaagtttgccagttcctaatccaggacacatgtatttacatggttgttaaacttttctgaacagccagtgggatgtggtaaatatttaacagcagcttctctggaagagaatgtattcgttagtatgtatttatgtgtgtgtatatagtttattgtaaattttacttatttttctatcactttcttaagaccacaagacaattaataaaacaaattgaaccctgttttgtagcgtctgctgattttctgggtgtgaatccttcagccatggcctatattgttactaatgggatgtcactagcaccagagttgggaggacatgcgcagtagtagcacaccagattcttttttttttttttttttttcttttgaggcagagtctcgctttgttgcccaggctggagtgcagtggcgcgatctcagctcactgcaacctctgcctcccgggttcaagcgattctcctgccttagcgtccccagtagctgggattacaggcgctcaccaccatgcctggctaatctttgtattttcagtagagactgggtttcaccatgttggccaggctggtttcgaactcctgacctcaagtgatccacccacctcgacctcccaaagtgttgggattacaggtgtgagccactg[133 bp omitted]ccagcacagtgaagccccgtctctactaaaaatacaaaaaattagccgggtgtggtggcaggcgcctgcaatccagctactcgggaggctgaggcaggagaatcactcgaacccgagaggtggaggtttcagcgagctgagatcgcaccactgcactccagcctgggcaacagatgagactctgtctcaacaacaacaacaacaacaaaaacctgctactttctcagtgtgtccccacaccagcagcatcagcatgacctggaagcttattagaaatacacaatctgggctgggtgcggtagctcacgcctgtaatcccaggactttgggaggccaaggcgggtgaatacttgaggtcaggagttcaagaccagcctgaccaacatggtgaaaccccgtctgtactaaaaaaataagaaattagccaggtgtggtggtacacgtctgtaatcccagctacttgggagactgaggcaggagaattgcttgaacccaggaggcggaggttgcagtgagccaagatcacaccattgcactccagcctgggcgacagagtgagactgtctcaaaaaaaaaaaaaaaaaaaatacacaatatggccaggcgtggtggcttacacctgtaatcccatcactttgggaggctgaagtgggcagattgcttgagcccaggagttcaagaccagtctgggcaacatggtgagatcctgtctctgcaaaaaattagctagttgtggtggtgttcacgtgtagtccccagctactcaggaggatgaagtgggaggatggcttgagcccaggcgttgcaggctgcagtgaggtaggatggcacgactgcactccaggctgggctacggattgtgaccttgtctctaaagaaaacggttaatttgaaacttcacacctgtaatcccagcacttcgggaggctgaggcaggcagatcacatgagcccaggagttcaagaccagcctgagtgggcaacatggcaaaaccctgtctctgccaaaaatagaaaaaattagccaggcgtggtggcacacacctgtagtcccagctactcaggaggctgaggtgggaggattgcttgagtgcgggagacggtggctggagtgagctgagatcacgccgctgcattccagcctgggcaacagagtgagactgcgtctcgaaaaaaaccaaagaaagaaattctctaagagtagctcgaatgtcagtccccctggtcacccacagtgtgtagaattcaggtcatctgtcattcctggggtgttggtttcattattttcaggtttccccaaacttctcttgggtaggtcttctcagcctttaccatatctgcacggtgtgacct[138 bp omitted]gcctcagcctcccaagtagctgggactacaggcgcccgccactacgccc[168 bp omitted]aaacagatacttcgtatcaccgtttaaaatggaaaaccactaagccatgagtagaccattgtaaaagcaaacatgaaaatgaaacaatgttttcacattcaaagtagatactgtcgcctgccaaggtgttgggcctgctttttctttgatacaaagggagattagcaaagtattagagcgttattgaagaggcttcagcacttggcggaaacttccttcctgatgtgatgagaaggagtgaaagagaattgaaaacgggctaacataatctatgttattcattgtcgtttaacgccatgtctacatgtcgcctaaagtcatgtcacacaccacattcatcccacactttgggaaactcgcagcaccatgtcatcacttgctaaatagaatccagtcgtggcttttcaggggacactgagacacgcaaaacctgtcaggctgatgagccaaggacgtttccagtggtttcgcaagcctcctccaagtgttgatggctgccagctttcctcatctggcctctcgtagcaaattaacttagtcaacattcacttacacaaatatttgtcagttgcctactgtggtagctttaaaatatggccccaaattcgttgacccttttcccagcaagagaggagggtgcagctcccttcccttgaatgtaggtgggcttgctgatcaatagagcacacaggaaatgacaccgtgtaactgacgacgctaggacataacggacagagatgcagcttctgcagcattgctggaacagtctctctgaaagcttttggccaccatgtgagcagtccaactgccctgcggctgccatgctgtaaggaagctgaaacacagatctcatggcaaggccctggccaagagatgcccagccaaaccccaacagctcctgcggcagccgctgactgtaattgcatgagagaccctgagccccgtcagaaccacccagcctagcccttcccattcctcacccacagaaactacgaaagataaagaattgccattatcagccactaagctttagggatgttcattacacagtagtatgtatccaccacacctatgaggcatcaggcacatgttggattcccgggatgaactagacaggccctgacttcacggagatttgcagccttttgtggggagactaacagtagacaggtaagcaaaataatttgagatagtgatgggtgctacaaagaaaataaaacagcatgctatgacacagtgacagaaagagggaatactttttgtttgcttgtttgttttgagatggagtctcactgtgtctcccaagctggagtgcagtggcaggatctcggctcgctgcaacctctgcctcccgggttcaagcgattctcctgcctcag[221 bp omitted]gagccgagtgaccaaaaagagaggtggtggagatgagctcagggagggagcgtgcagggccttggaggctgcagtgaggagttagggttttctcctaattgcaggggttggaggcaggaaatgggagggcttcaaatgacttgcccttaactgctgattggcctctgtgctgtcagcttcctccttggctcaccaggatacaggtctctgaggagcctctgaacccaggctgagctctgaagacttatgtccctctctcctctgcagccaaagaggacgatggcttctgcagctgggcttcaggaaaaggggtcttcacagctgcaattaagttttcatcttcccatcatgggcagggagccagcatgtgtttttatggagcaaaaggagctttgctgtctgacgcgctaggagccaatgctaggacatgggtttgtgagaaaagctttttattgcaagttgactaacaagcagatgggagtccaactcaaagctgtctccccgtgctagctttaagaccatactttttgcgtgtgtggagatggggtctggctatgttgcccaggctggtctcaaactcttggcatcgagcaatcctcttccctctgcctcccaaagggctgggattgtaggcctgagacaccacgcccaccctaaggcagtcaatacctttattagaagaggtgtagggggtagactgtggcattagtaggtaggtgactggtagaaaggaataggaagtctggaaagtcctctggcatgcgcagttatctcttcatccctcatggagcgcatgtgcaagttcggggggcattagtctaaaccatgcggtagaaattgaggctatgacatcagcaagctcgttctgtgcaaactccagtccgccatattgttccaactgacttcagccagttttgttatcttacaagcagagggagtttcagtaagttgtttcttttcttatccagcaaactcaggaatttctattagtcataggtttctttaactcctggggcagtgcttcagtgcctgctctgtgcccagcccacactgaggttgagtacccagagatcaatcaagtataattcctgcccttaaggagcttggagccaggtggggttggagggacttcatcatgaatgcgttattagttcatctgccttccccgttctccctcaacccacggcctcaagttcctgacaacaggatgtcggatgtgaccaatggtggccccttgcccatgatggcaggaacccctgacccaaactaggcacatcagccagggatttgggactggaattgcttctctctggaagaaagctgggctggatcctgttaacatggggtagggccacattctccttcacatgacctgatctgcaaccaggtcagccgtgctgagaggtggagagcccagagtgccacagccgggttcccaagccttcactttgctcggtgacacattcctatctcctgatcaactctgctttttctcctcctcctcctcctcctcctcctccttcttttgttgagatggagtctccctctgtcacccaggctggagtgcagtggcataatctctgctcactgcaacctccacctcccgggttcaagcaattctcctgcctcagtatcccgagtagctgggattacaggtgcccgccaccacgcccggctaatttttgtatttttagtagagactgggtttcactatgttggtcacgctggtcttgaactcctgacctaaagtgatctgcccaccttggccaggctggtctcgaactcctgacctcaagtgatctgcccgcccaaagtgctgggattacaggcatgagtcgcggcacccagcctctttattttaaattaaataaattaaattttacaataaatacatttgaaataaattcagacttaaaaaaagttgcaaaaatagtacaaagagttccatatagcctccatcagcttcctcagatattcacatcctgatcaaaatcaggacattcgcactgatacagtactattcactaatgtgcaagccttattcacatttcctctgttcagctctagtgtcccttttctgttccaggatttagtcctggatcctgtcttgcatgtaggtatttctccttagtttcctttagtctggatcatttcctccattttttatataccttttcttgacaacgacatttctaacgagtactgcccaatcatttggtagaatgccccttaactttgggtttgtttgatgtttcctcacagtgaaactcaggttaagtgtttttggcagggattacgcagaagcgatgt[136 bp omitted]cctctgcctaccaggttcaagcgattctcatgcatcagcctcctgagtagctgggactacaggtgcgcaccaccacgccaggccaatttttgtattattagtagagatggagtttcaccatgttggccaggctggtcttgaacttgtgacctcaagtgatctgcctgccttggcctcccaaagtgttgagattacagacgtgagccaccgcgcccgtccaatcgcttgctttaaatggtatctgccaggtgactttttcccattgttatgttggggggatattttgggcctttgtaaacaaataggaaatattcgaggaagagaaggggaggaggagaagggaaggaaggaaattagctcactcactcacttgtttttgatctttcttatcatgcatcgttgcaaataagtaaacaaatcagccaggcttctgggcaaaatccaactttgtgtcccctgtgaaaaggaaaacgctgtgtcacagagtgaccactggggggcagcagagacttgagaggaatcaaaacaactccaggaaaaagggcagttggctaccttctgggaaactaaacttaccggtaagctccgcatctgctggggttctggtgtcttccatgagccaggtcgtggaagtggaggtagggagtcttagttgcacctcgctcccagcctgctgctgctgttgccaagccgtatggatgccccaccttgaaaactggggctgtcacctcgggagggcttcacgaggtctgagaatccccttctgagactggctagaaaattcctgggtgctgagggtgtacctgtttggagactgattgcaaccccccgaaagcagttctggaagatgtaagccaagggggaatttactggaaggttatgaggatattcatgagatcaaaaagaaaggagaagcaaccagcagtttcaacaggtcttagaagcaaaaatcactgaggacaatgcgccgggtgtctcccccaggatgcctgatctttgactgctttcagtctcacccttcaacgcagggttcagagtctaaggagaaagtgttggatggggtcagcagggtacggtacgttaatttgtgctcacccccaatcaaattcattcctccataaatattttctttcttttttttttttgagacggaatctcactctgttgcccaggctggagtgcagtggtacgatcttggctcactgcaacctctgcctcccggattcaagcgattctactgcctcagcctcctaaggagctgggatttataggcaccgccaccatgtccaactaatttttgtatttttagtagagaagggggtttcaccatgttggccaggctagacttgaactcctgacctcaggtgatctgcctgccttggcctcccaaagtgctgggatgacaggcttgaggcaccgtgcctggcccttccatcaaatatttattgagcaacaaatacatattgggctctgtgtgcccagccagtggtatgagatgccatttgagacatccaagtggaggcagccagtggaatcccagctcctccccgggacctaggaagcccccatcccatgactctgcagccttcctcaacctcctgccctgccattcactctgtgcccatgacaccagcctcctcactgctccccccacccccaacacactgagctcatttgctcccttcccacctggaaccgcctcactcaatatgtgagagccacccacacagagacagtatttaaagccacaaaaggacggtcactcttccaagagaatcagggtgttattccaaaagaaggcaggatggatgctggacagcaaaaccccacaaaatgtccatgacaggattccaggaggggcccatgatctcacaataagctgagaacaactctcagccctcctgagagcctctgtgtgagtgcacgtatactcatgcatatatgatactgtggctttggagacctatgcatatgcattttacattgcagcccaataccataaatgcatgtgtatatgtgcactcacacatacactgaaatgaaaattttgcaaagctatatttatccttattacaccatcactcctgatgttttagttagatttttatcctggttcattagaaaaagaaagagaaaaaaaaagccaagcgcaatggctcatgcctgtaatcccagcactttgggaggctgaggtgagcggatcacctgaagtcaggagtttgagaccagtctggccaacatggtaacatcctatctctattaaaaatacaaaaattagccaggcacggtgacacactcctgtaatcccagctactcaggaggctgagggggagaatcgattaaacccaggaggtggaggttgcagtgagctgagattgtgccactgcactccagcctgggcaacagcaagactctgtctcaaacaaagcaaagcaaaacaaaacaaaacaccaaaccacacacacaaaaaacaaaccaaatcgggtataactcaccaatttgatctccacagggctcctgtgtgcccctgctccaccccacagccacaactctccccctcacttgtacgattttaacaagcacctaattgacccccctgcttctgtttcttcctgtgaatccaccctgcccgaatacatctttctaaagcccagctttgattacatcaaaaacctctggtggcctcctgcctgaattccagtttctttggaattccttgtcactcctctggatatttttctctcctccatggcacagcaccttccttcccaacatcaccgtaaaaaacgccttctctgggaggccctcctcactccctcacaccctcaatatttgctgagcatgcccggtgatagatttgggaagtccatttcaacaaggcaaatgatagctactcactcgcagagcttatgggaaagacagatttgcaaacaatgactataaagtatggtaggggaagttgggtctaagtgaccctaatctacccagagagcatccaggaaggcttcccgaaagaagtgccaatcaaggtgagtgctaaagaggaaggtgtctcccaggcgacactggcagtgtccagagacatttttgcttgttaggattgggctgtagtgctcctggcagggagtgggtggaggccagggatgctgctcagcaccctgcagtgcccagtacgggcccccccagagaattatctgatcccccaccatctgcggtatctgcagtgccgaggggtagaaacagctcttgaaggcttagtcccgtgctttctgtatgttgaccttctttctcacaacaccgtgaggtatttttaatgtctcttttccagtgggagaaaccgatgaaggtaatttacttgagggcacagtgaatgaccgtggagctgattctcaaacctgtgcagtctaatccctgccactctgcctctcccggccgaggaggagctggggagtagcaaagaggaaggggagaagcgctcagttggcggccattttgaggagcagggccaaggggcggggcggggcaatgcggggacggacggtgctgccaaggctgtgatggagacttggggaggaggtctggacggccagatgccggaatgctgtcttgctctgccgagggccaggcacccaggagctctgggcagaggtgaagtcagcagctcctggagggtgtttccattgtgggagtggctgaggtgactgagggggtagaaggaggagaggagtgggcaggacccaggcgcagaggggcagcagccagaggcaggaggaaaacaggggtggcggcggttggcgggggtggggggcactccagctggagcatctcccctttcttttttttttttttttttgtttttttgagacggagtctcgctctgtcacccaggctggagtgtagtgacgtgatcttggcttactgcaagctcctcctcctgggttcaagcgattctcctgcctcagcctccccagtagctgggactacaggagtgtgccatcacacccggctaatttt[156 bp omitted]gttgcagtgtctggggtcccctcccatcttgcaagggagttcctgccaccagaaagtttgtgaaggcagggacatctctgggcctccccacccctccttgctgacgtctgtctggaggtcagggctgtaatggcagttccatcatcaccagggacccaggctccttctgactcattgcttttccatccttatcatggggcttccaccttgaggtccactgtggctgccgtgctccagccatcacatctgcattccagccagaagccttgcttttcccatgtgtacaatggggattacatctaccttaggtcatcaaaaataggagatgggatagaagtgtctagtgtggagcctgctgtgattatggccagtaccccctagaggtgcttggtaagaccaaggttcccctttttttttttctgaggcggctgcaccctggggacctacccagagggctttggaggcacatgatggcctgcggacctcaagcgggctcctctttcctggggcgccatcccccatgctctgagctcccgctctccccagcctctcaggccccatgggcagggctcgggcctcctactctgggccctgcagtccacactgggcctggctcttcaggggctggggaggtgggtgagttggcacttgcctaatttggctcaggggtctcagctggaggaatgtctgaaattgtgacccagcagggggtggggcgagtggatttcctggctgatgttggcaccgtcaggacacagtggggtcctggagtcccagcccagggaagtgagaggcgattctagtgtcacctgagacagagaggcctgggctggggcaaaggccgagtgtccctgggagcatacggggcactggcctggcactcgggaaactggcctggctgaccagcaactgtactagcctctgtgggccaccctccctcccgcaggtgggccctgcctggttcctgagcccattgctctcctctgtagggtttcttcaaagtcctatagccccgcaccacagtcccctgagagggaatggcagcaacaacacgcttcctggctcctacccgaatctcaccgagtcatgctccttgtgaaatgggtccaggaatcggccatttttgagcaagctcatgcactgattctcaatgattctgaagtttggcccgagtaaaccctgcggacaaccaggggttcgcatccgagactggcacacccgcttcctccgctagatccgagtgggtctagcctgtaacaaatgtaaacaggaggctggggcggtggctcacgcctgtaatctcagcacactgggaggccaaggtgggaggatcgcttgagccaaggagtttgagtccagcctgggcaacacaggaagacccccatctctaaaaaaaaaaaaaaaaaaaattagctggatgtggtggcgcacgcctatagtcccacctacttggggaggctgaggtgggaggatcacctgagctcaagaggttgagggtgtagtgagctatgatagtgccactgcacgccagccgaggtgatagaatgagaccgtctcttaaaaaaacaaacaaacaacagaaaaaaacccaaagtgtaaacaggagccattgaccatcctggacaaagaacggtttctgcgccatcactggctcaggataggccttgctaaggaagtaaggggcccaggctccttccggaaggcactagaacatccccagggagcccgcaggcaagtgcagggggcacctctgtggtttcccctctgggtcttgagtggggcaggcccggcaggctggtgtcccacggcggggggacagggcctagagtgtggacagtgagtccaaaaatgggcacgctcagtgtgtttactgctatgaaaaatgagaccaggcctgagaggcttgtggcttcgctgccacctctgttcctcctcgtggatcggaaagacaggccagagcctaaggcagaaaccagcttgtattggttaccaggagtgaggaaaagccgggcattacaatccgttaactgtgagcttcagtgtctccaaggagaggagatgtatattttaaagacattctttctgtctgatttcaactaaggtttgggctatacgaccagacaaacagtgtgattattcccagcttttcgtttctaaagtgagcacgcgtctttgtcttcctgcacccctcactctggcgcaggcccagcgatgctctgagctcctgcgggcggggaagtaggtttttaaaggccacgtgagctgacattagtaccttctgtgtgaatgagaacaaaacatttgggactgaatatactgcaatgtacacattcataagaaacgttctaataacaattagcgcacaaaactattggtataaacatttttccaaaaagagaaaactattgcatttcgttagaaatcgcgtcctgggccgaggctcgtctttcttctctgcagttggtttggggacagaactccagcacgcagctgtccaactgcagcggctacgtgtttccatggagacaaacttggtgtctcaagttcagggcttcgaaagtcccgaatatttgtttgtcccgagagaagagttttgactttgaagaggtccaggtgggactcgctgggggtggggtgctccgggattagttcagagggaggtgttctggaagactccgtggagcgggacgcaggcactgctgtttggacgacacgcgggatggctgctttctgaagttgtggctgtgacactgaccctgttggacaaactccttccacagccagtggcttgatggtgacggtgaacttggacagagtcccacatccttcctgctgctgataaaacttctggttttgattttttgaaagacactgctgtgtcctggcacgagcgagcccgtttctgtggcttgttctttttcgagctgcggatctgccgggacacagcgattgtcagctgcccctcaagtcctttggcatctggagatgggttcctgcagcacagccggcctcccgcctcggggcatccggcagggaggtctggatctaaaaggccacagggcgctgcgcccagctgggtccctcccacatggtgctaccagacaagggcactccactttccattcctgaggggactccagggacgctggcgagctctgtgcctccccagcggtggcaggtaggaggggagaggccgtccctttctagtcgggctctgccaggtttttttaatttttaaaatcatggtgaaaattggttccagttgagtgcagaggccagtgctctcagcacagccctttcagctcttaaagggactggggccaaagtccagggttccagcagaggagggtttgtccagaataaggaacccatggtctggtggggccctggtggctgcgcagggacctggggacccagagcacagctacagccagtgggagccctggcctgggcttctgtagcttcaacaactgctttccttcttgaacactgaccccgggagcccccgcttgagtcaaagtaaacatcacatcatctaagaggcactaatttggtggagccggtgaaatccaggttcccagagtgaccaggcggcatcttttggaacctcgaggaggcgccggccggggctgctagatgccctgcagggagtggttggggtcactgcgctcccgctttaccaggggctcacccaggctgcgggcgtctgggcccgcctcgctgccacgctgctcatcgcccatgtcatctgcggagggaggggtagggtcagtgtccatcatcaggagggcacgagagggagagaaggaagtgcacgttccgagaactgctccggcacgccaggcagggcaccgaggatacatggcagcctgtggaccccacctcggcctctgctccaggctgacctgtcctccccacctgccgttacccagaggtgcccccagctcgggccaggcgaaagagcctctgccctgtgcctccctttcccagcgccgacgggcctggggcctgctccccacagggctggggcctctggggtcctcccacccgcatgggacagagacggggcccgggggtccctctggcctgcctgtcccactctcctgctgggcgtgggcgcaggagaccaggggctgcctagtctgggcctggtgctgaggtccctgggcagcggctacccagaggccagcggcagtctgagccccagccgagccagtctgcagtgtcacctgctgctcaggcatcacccactgtccggatgacagatcccagggccctcaccccccaaggggctgcccgcatttccacctgttcatcatgagatggggcagacaggccacggccaggagtaccaccctcctgggagggtcgtggtgggaaagccgcagacgcacctacctttgtcgagcagcgtcagcgacagagaggcgagatcgttgaactgaaagagaaacctggagtcaggggcgcctgcagaggggcggcagttgctgtttgggggctcgggggatgccggcccaaccttgccttgagccacgtcctccattcacagtgaagcagctggggcctgccctgaaatgtggctctgatgctgccaggtgtctgggtgggtccctgtgccctgtccaggccgcctctgggagctgctgggggtggagggtgctgactactcggggcagcgaggggacagcagctggctcccaaagtcccctgggtgcggctgctccgggttttaaggtggcatggaagagccgtgggccaaattatctttgctccctgaagtctgtacacagcaggaaaaccactccttggctgccccaaagcccggcgttcacgccaatgtgcagagaacaggcggcttccacagtttctgtacacgttgcggggccctggccaccgactcttagagtgctgtggcttctgggtagtaagagtgcagggaccccgccattcatcaagcatcatctcgtttcttcctggaggccatcccacgcagcccagcaagtccactccaaggtgtggaccccgaagaactgaacacaggagtgcacacaaacacccgcccacacacgcccacgcagccccgttcacgacggccacagagagggagcgaccgtgcagcacggagggacgagcggtcagcacagcgcggccagccacgcaccggaacacaactcagccaggagaggaaccaggctttgacccgggccgcagcgcggatgtcatgttccgtgacagacgccggacacaaaaggccacacagtgtgtgatcccatttctatgaagtgtccaggacaggccgatccacagaggcaggagggggctgcgtgggtgctgtgctgcaggaggagcttgggaatgactgctcctggggacggggtttccttttggggtgacggaatgttctggaactggacagaggtgccagctgcacgttgtggatgtgctaagcgccacttgattgtgcgctttcacgtggaaatctctccctatgtgtgtgttaccacaataaacagaaaactctgggtggtgtgtccgaggcctcccctgtgtggcgggacgcccaaggacaacctccttccagagccagcggtgcgatggggactgtgaacttggacagagccccaaatccttcccagtgctgataaaacttgtggttttgatgttttgagacactgctgtgtcctggcacgggtgggcccgtttctgtggcttgttctttatcgagctgcagctctgtccgggcggcagagcagtgggacctgcgagtgtcctctctctgggctgctcagagcacaccgccctctccccacaggcccggccaagccccggccgtcccacccaggagggtcctcacctctcccatcacagcgatcggcgtctctccggtggcctccgcgacgcggtgctccaccaggtagaacatgtactcgtcgtagagcaggcggatgaggtggaaggagccgaagctggcagcgctgcgcagggtcaggtcccggatcaccatggagctggggacaagcggacagaggctggggaccctcaggggagcatggaacccgggccccaggccagacttcatggcagcaacacaccccctgctctacgttccctggggaacccagaggctgagtgatcctaagacgtgcaggcctacgcgggggctgacgggctgccgagaccctgggcccacgtgacggacaggtggggccggcctgcgcgctcagttccagagaccacctggggaacaggagagggagatgggcagtcagccccaaagcgacaggctgcgggaaacaactgtggctggtgctagcgcaggcgctagatgggatcttagctggtgagtctttctagtgacatttcggactccgaatcagagcacaggctggcagctggtgcctgtctccccagcaggaggcgcctttccccaccttccccgtatccttgccacctcccgccattcctcagcctgtggtttcaggcacctaaaaacaagacaaaaagccagggtgctttagtctctgtcagcgaaagcaggggtttcagagacttcagcccagatccagtccgcgtccagccctcagcctgtgtgctgacaatgctttacattttgaaatggttggaaaaagtcaaaagaataattatattcggtggcacgtggaaattacatgaaattcacattttggtgtccacagacagtttcactggcacgcgtcatgcccgttcctatgttgtctttcctaggatggctgcaaatactacctggttctttctgggagaggcggcccctgacctaaaggatcagtataagaccaaagggggctaggcacggtcgctcacacctgtaatcccagcactttgggaggccagggcgggcagatcacttggggtcaggagttctagaccagcctggccaacatggtgaaacgccatctctactaagaatacaaaaattagtgaggcatggtggcacatgcctgtaatcccagctactcgggaggctaaggcaggaaaattgcttgaacctgggaggcggaggctgcagtgagccgagatcatgtcgctgcactctagcctgggtgacagagcaacactccatctcaaaaaaaaagaatgaagtggaacaatgtctcagtcctcctataagacctaaaggacttatatacagtggcacctgattaaaaactttggcctacaagccaggcggcccccaatgcccaactgccccggctcgaagtatactttcataaactctgttacgtctaatcggtatcgagcgataaaaagaagacacaggcttgagaaaggcaaagacagccgcactatgaagaccaccaaagctgtctatccttaagtgtcaagcatagctgcaaagcccccagccccctcctgttcctccgggcccacccaggttggcttccaagccccctttccccaaaggcctcccccacgcagatgaggtgctggcactctgcaaccagcttccccacagccccggtgtctggtgcgatgcttcagtccaaagtatttccagaacatcgcctgcggtcaccccggtatctctgggttcccaaatgggctcgcagctcccagagagtaggagcatcggccgaccaccaccaagggaggcccagccagagcttggggatgaccagccaaggcctcagtccacatgctaccattttctagtgggtgctacagaaataaatcccgtaaacctaatttttattttttatgactgcactgcacgtgcataagaatgaagtcagaccaggcgtggtggctcatgactggaatcgcagcactttgggaggctgaggcaggtggatcacctgaggtcaggagtttgagagcagcccggccaacatggcaaaaccccgtctctactaaaaatacaaaaatcagccaggcctggtggtgggcacctgtaatcccagctattcaggaggctgaggcacgagaagtgcttgaacccgggaaggggaggttgcagtgagccgagatcgcaccattgcactccagcctggtgacagagcgagactctgtctcaaaaaacaagcaaacaagagaatgaagtggaacagtgtctcggtctcccttgtgaagagcacccccaccttgcagacgtgaccccgatcccctccagctctgagctgtgctcttctctggctggcaggcacctcagtcctgcgctcactctgctcttctcaattcttccgcttgcaaccttccctctgtccatggagactggcatcggcatccctacgctgtctcttcccttgctcttcctccctcattatcccagtgtggctttattgtaatttctggctacactggtgtttctgttatgtggcagtggtgtgctaggtccatggcagagccgcatagtctattaggcgtgtggttcctctcattcattcactgagccagcatttaaacagaagtgaggtcccggcactcgggtagcgtgcctgatcatgcaggagacagacaacagacaagtgaacagatgacaggtgacggtcaatgccaggagaaaggcagggcatggggcatgcaaagtgggaaagaatgggccgtcttatttacagaggctgggggtgagggatttctctgcggatgatgggtttctctgtgtggctgtctgggggaaagatgttccaggcaaggggggcaggtgcaaaggccctgaggcagcgtggccaggggagtgtgtaaggagacagctgagaacaggggtgctggctggccagctgaggggtcagcaaacttgttcttattttttttttttttcttgagatggagtttggctcctgttgcccaggctggagtgaaatagcacggtcttggctcattgcaacctctgcctcccggattcaagtgattctcctgctgcagcctcccaagtagctgggatttcaggtgcccaccaccacgcctgactaatttttatatttttagtagagatggggtttcgccatgttggccagtctggtcttgaacttctgaccccaagtgatccacctgcctcagcctcccaaagtgtggggattacaggcatgagccactgcgcccggccaggcaaactcgttttcacgcttgccagatagtaaatattttcagctttgtagccaacagtcaaactgttttgtttgcattgacagctgtagctgatctgtgaattaatgcatgtggctgaggttccaataaaactttatttgcacaatgggctggggcagtgatatggtttggctctgtgtccccacccaaatctcaccttgaattgtaatgatccccatgtgttgtgggagggacctggtgggaggtaattgaatcatggagacagatgtttcctgtgctgttctcttgagagtgaataagtctcatgagatgtgatggttttataaaggcgagttcccctgcacatgctctcttgcctgccgccatggaagatgtgcctttgctcttccttggccttccgccatgcttgtgaggcctccccagccaggtggaactgtgagtccattcaacctatttttctttataaattacccagtgttgggtatgtctgtatcagcagcatgagaatggactaataatacaggtggggataacaatttggccctgtggccatagctcatccatgcgctgggtcacgtggggcctgtcagccacagaacagctttgttttttcctggggtaataactggctctttttttaaaaatgcacattttccatgtactcagggagactaaaactccttgacagaactgcaggaggcatcttggtgcctttcctggggacaatccctctggaagccttggctcccctgccctggtctgcacaggttaggtctgtagcttggaaatgatttcccttcagagctctcaggacatcgctctactgccttctgggtttctgcacattgttcggaagtctaatgctgctcccatccccagcctgtttctttctctctggaagcttttatggttgtttctcaaacttggtgtttcgatatttcaccaggagcctccttgtgcccttcagttctgagatagctttgttccccccttagagatggggtcttgctctgtcactcaggctagggtacagtggtgcaatcttggctcactgcagcctggaccgcctgggctcaaggatccttccacctcagcctcacaagtatctgggaccacaggcacatgccaccacgtccagctaagtttttttactttttgtagaggtcctgatattttccccagggtcgtctcaaatttctggtctcaagccatcctcctgccttggcctcccaaagtggtgggattataagtatgagccaccatgcccagccctcagtgatgatttctgtctgcagaacttgcaacttagtatttaggccacggtggccttctgggcctgcccctgggagccgctggtcatgagtgaggcccccagccaggtagttgttttttgcgggttcagacactgctgcaactctgctgagccctgttttgctctgagctcaccagccgagccccctaccctctagaagtttctctcagagccccccacccgccagaattctctcggaggtctggtgggactaacctgtaaaaggaccatttcagcaagaactgccgggcggccttggggaagctggggctgccggcatgctgcttcaggacctgggtgaccacactgtccagccagctggcccactggtccagggagctctgctgctgcagggtcagcttgaaatcctgctccagccgctgcaccacactctcctcgcactggcacacccacgaggcctgctcctgtgggcagggcagaggccagtgtcagcaatgtggacccccagccacggcagccctccctggacctagccatgctcagggcgggacatcgtgctgtgcttgagccttctcgcccttgaccttgacagctgcaagccaagtcctgtgtctcccgtcacaggggcagaatagagagctgagggggatcgtacccggcttccggggactcatacccaggtctttctggatcaaagctcatgctatatgaggtctttgtttagctttgtttcaaaggggtcacttctaaatgtatgtgtgtgcgtttatttatttaatggatagacgcagggcctgaaataagcatagctcggaagctgctgtgggccgacactttgccaagcccaggggacagagccaggaaaatggccacagggaggtcaacgtggtgccacgatcctggaagctgggggcctttgtgaggaaaatgagcagaagtgttggccacagcgcctggacgccagagggccctgagagatgatggagtggagagagctgggggctgtgggtgggctttggcctgggacccgtgtcatgcaacagaaccgtggccaggctcggggcaggggccaggttgtgccacgggctccacttggtgggtttgctggttttgctggagggcgggaagcccgggccctggggacggtgtggaggaagtcacctgcacgttggcaaagtccacgcggttgaggtcgctgagcatctggttgatctgggacgtgttctgcagcaccgcccgggccgcctgcgccaggtggttgagggacgtgtagcgccgcagcgtctgggcgaaggcactgacgacgcccacctgtaagccagggctcgtggtgagcaggggttcgcagggagagcctgttccgctgcgctccttgcaggggtgtgtgggctcagggacaacacagggaggagggagcaggaaacagcaacctgggcagggaagagggaacctcctgctattcttaaggacccagtgtgtgagaatcagtgaagaggagacctcgccggcacatcacacacgtcgctaactgaggcctgcgtgctgctgagttagaattcacaactgtcgccatgcccacttctagagtccctgtggttctctggaggggctgttgagaccacagactcctgagtgctacaggatcagacttttagtgggtgtggcctgggaatcttattttttttaagagatggggtcttgcttgttgttgcccaggctggtctcaaactcgtggcatcaaatgatcctccagtctctgtctcccaaagtgctgggattacaggtgtgagccactgcaccggccctgaatgtgactttttaacaatgacctgatcaatgcttgcatcactgcctaacagatcaattccgaagagcaggcgggtgccctgcagctgcctcctctcacccaagagcccttcaggaaatgctcatgatggctgggtgaggtggctcacacctgtaatcccggtactttgggaggccaaggcaggtggatcgcctgaggtcaggagttcgagaccagcctggccaacatggcgaaaccctgtctctactaaaaatacaaaaaaattagccaggtgtggtggcgggcacctgtaatcccagctattcgggaggctgaggcaggagaatcgcttgaacccgggaggcagacg[138 bp omitted]tcggccaaggttctacatttcaaattcgactgatttgtggccaagattgcagcaataagggtcacagcaaggagattaaatttcccgaataagatgagcacagaaacacgcaatctgttctgaattgacccaaagatgtgacatcaaatgacatcttctgttgttccccttcctgccagcactgacgcgtcaccggcagtgtgctcagggcttcctgaagggatcggttactctcatgacgcagggaagaagccagcgctctctgggacacagtggtcctcatgctgtcctggactggagcccctcccagccatcgttggggagcccaggccccaccccggacgcaccttggtctggatgacctgttgtgggaagtcactcatggcatttgtcaaccagccttccaagctcttggcaaagttacggatggcctgtgtcaaggtacctgggggatacagaccatgatattaccagggagaaaggcagtgactggaccctggaaatcagcattcagtgtaagagctggcccaagtgcgatgaaaatgaccaccatgaagaacgagccacacaggcgacggggaaccgaggacacttagaaacgggaagaaccaggcatggcccagcgctgctggtcaccacccactgcctatgcgggtctcacaggggcgattctgccccaggggacactgggcaatgtctggggacgttaatggtggtcatgactgcagggtgcctcaggcatggagtgggtggaggctagggatgctcctcagcaccccacagtgcccaggagggccccaccccagacaacgatccagccccagatatcaacagtgccaagggaaagaggccttgacacaaacacacacacacacgtaaatacattctaccaacttcctaatttattttaaagtgggttagaataagaagcaaatgatcagactgttaaaaaaaaaaaaaaccaaaaaacaaaaacagaaaaaggccaggtgtggtggctgacgcctgtagtcccagcactttgggaggccgaggtgggcggatcacctgaggtccggagttcgagaccagcctggccaacatggtgaaaccctatctctactaaaaatacaaaaatgatctggacgtggcggtgggtgcctgtagtcccagctatttgggaggctgaggcaggagaatcacttgaacccaggaggcaaagactgcagtgagcctcctgcaatccagcctgagtgacaagagcaaaactctgtcttaaaaaaaaccagaaaaatattttaaaatgcaaaaggaaagataccccaaactcccaccataacatagaaactcagacgaggcattgccctgaacagttttcaggcagacaggcaaggccaggccaaatgagaaatgcaatacttttgctgtttcccatcttccagcaaagggagcatagagtttactcaacaggacggagagctgcctggtactaacgggcatgcatatttgtggatggcctgaggggcacggtccatgggcccggatgtttgtggatggactgcggggcatggcctgtggtcctgatgctgtgatttatgaagagaggcctctgtgcccagcttccttgacgacccccagggttttggggagcttggcacgggcctggcccgagggctccctcgtggtgggtgctgtcattgcctcaggagctggaggccctgggaggtctccaagggcacgagtgatctctgccgtgggcctagcttccttcctcactgtgcctgtcactctctccccaccccaccaagtcctgtgggaaatcacagggtggggcgctggggtgtaaatgtctcctggaatcccacggtgctgggaagtggggtctggctgggggttaaaggtcagcctctaccctaacaggctgcaggagtccagggccatgtcccagcttcttcttctgagtttatgtccctgcccctcctacaggggtggcactcaggatgtgtcacagtggggcttaagggaggctggaggaaggtggctggtggtcgtctgcaagaccagggtgcgcagcaaccccacatggccctgggccaaggcctcccgcacagtgacggctccagggctgcacacaggctactcccagaggccggcctgcatgcccccagtgaaccttctagaaagcaccgagcccagcccagctactcttggctgtgtcctgacagcaggtagagctcaccagagccactgtgaccttcccctcgagtcagagacaaggacaaataacgcatgccagaggggacacattctacggcccacagcggctctcacttagggattttttttgagacagggtcttgctctgttgcccaggctggagtgcagtggtgcgatcatagcttactgcagcctcgacctcttgggctcaggtgatcctcctgcctcagcctcctgggtcgctggactgcaggcatgcaacaccacaccagctaatttttgtattttttttagaaatggggtctcactatgttgcccaggctggtctcaaactcctgggctcaagtgatccttctgcttc[133 bp omitted]ggttaaagctattctcctggctcggcctccctagtagctgggactacaggcgtgtgccaccatgcccggctaaatctttgtatttttagtagagatggttttcagcatgttggtcacactggtctcaaactcctgacctcaaatgatctgcccgcctcagcctcccaaagtgctgggattacagacgtgagcaaccttgcctggccccagataaatttttttttttttttttagagacagggtctcactatgctgcccaggctggtctcaaactcctgggctcagcgatttgtctgcctcagcctcccatagtgtggggatcactggcatgagccaccgcgcccggccacttttgggttttctgtgaaagcgatggtctgaggtggctgaagacgtacatgtaagaaaggacagaggaggcaggaagagaggatggagcagcgccgggcggggccgtgggtcacttactggggaccggcctcagcacgtcggggatgagaatctccaccagcgcctggtagaggatgtggtcgcagctcctcatccacctgaggatggggtcgcactgacacagggagataagcttgtccttgggcaggacggcgccctcggggtcttcgtcactgtggagggaggggggacaggtgagctgtggcctggcccaggtgggctcactcagccacgggagcgagcagagagccgggctgcgggacttttgcccaacagtggggctggggttttgctccccatccctgagcctcgatgggtcccctccctccatgttgctcccggcgcctccgtgtttccccctgtccctcactgtccacgctgtccctcccctgccagtggtcatactgtcatactgcgtctcactgcagctatgggttggggtcacttctacttgggattgcatcatggtcacctctaaaatcctccctattcaaacagtctgaccctgcaaaggggcggatggcaatgtgaatttcaagtcaactctaccaagtctaaaaattacagggatggaggcagaggggtctgaaccctgattcttggagagctgaggctttcgtttgtgggttacctgtggacgtcagcagggggttaagtctggggtggctgtgaacccagccagggtgtggcagtcacctggcaggaagagaggtggggccgtcgctggaggaggccttagagttccagaaggagagccacagcttctcgatgtagtggaactggaggttcatcaccacatctacagttgcctaggaatgaagggaccggtgagacagacgggtgcgtgcgcccatcacgtgcactcagcacacgtcaagtgagcagccgtgatccgggctacagcggggtgccctggaatcccaagggaggccacagagaggagaggagcaggcgatggacatggatgcggaggggctgctgcttcagagaggatgcttgttggggggctcggggctccagctcctcagcgtcacccggggacgcctggcctgagcgctggcggttcccgggagggacacgcaggagctgcctgcctgggctggggcggtcacctcgcagtgccgtctgtacaccagctgcagggccttgacgtcgtgcagtgtgacgccgtcctgcagcaggaagctgcccaggtcgggcgctgggaactcggggaagacgtgggagacatctgggggaggaacacgggaacatcagaaatggcgaggctcttaggacaccgtggacaactggaaggccacggtggatgggggcccagaaacagatgttctgccccaccccatgcagtcagggaatttgttttttctttctttttctttttcttttttttttttttggagacagggccttgctctgttgcccaggctggagtgcagtggcacgatctcggttcactgcaacctccagctcctgggatcaagcgattcttctgcttcaaccgcccgagtaactgggattacaggtgggcgccacgatgccagctaatttttgcattttttagtagagacaggatttcgccttgttttggccaggctggtctcgaactcctgacctcaggtgatctgcccacctcggcctcccagaatgctgggattacaggcgtgagccaccatgcccggccattttttttttttttttttttgagatggagtctcgctctgtcacccaggctggagtgcagtggcacgatcttggcttactgcaacctcctcctcctgggttcaagtgattctcctgtctcagcctcttgagtatttgggattacaggcacgtgccaccacgcctggctaagtttgtattttttttggtagagatggggtttcgccatgttggccaagttggtctcaaactcccaacctcaagtgatctgcctgccttggcttctcaaagtgctgggatggcaggcgtgagccaccgtgcccagtacagtcagggaatttctaagcatcagttttctcaggtagaaaatggagaggatattgtcacctcccaggaacattaaatatgcagacacagagaaagccctgagcccaggccctggcacacagcaagtacccacagagccagctcagggcagcacatctcggggagaaggccagccacggtgtccctgcagtgacctcctggagatgggcctgaccccacctcaatctctgccgaagactcaacccaggagggttctgtttgggctcaaaaaagatcataaacgacatggaagccactgagtgtgtacagagcccacctgaatcatgacatgccagtgagccttccttggccgccccccacccccctgccctccctcatggcaggctctgagttagggccttcccggggcagagatggcaccaccactaagccagctggggaagaacgctgtcccttgagcagcccccagggaagaggccaagactgcctcatgttggggaaccagaagcaccccaaaagctccaggcaagaaggaagaaagcccagatagcaggcaaatcctggtgcaccctgagtagagaatatctagcgttctttctttttttttttctttaattttaaaggcagagtctcgctctgtcacccaggttggagagtagtggcgtgatcatggctcactgcagcctcgaacttctgggctcaagtgatcctcctgcctcagcctcctgagtaggtgggaccacaggagcttgctactatgcctggctaattttttaagtttttagtatgttgcctaggctggtcttgaactcctgagctcaagtgatcctcccgccttggcctcccaaggtgttgggatcacgggcatgagccgcctgtcctctagtgttctttctgatggtcatttgattttattttctcatttttctgatggtcattttatatattaatttttttggcatgtgctgattattctaaagtctcagggatgtcagaaagaaggtttatcgaaaactttctatttgtccgaaaaggtgtctcgtaagaaaactgtcggaagcagacgcttagacaccactggttctgctggtgttgaaacccaggagtgtggcgagcagatgggagccccgcccccgggcctgaccgggcctctcacctatgtactgctggtggtgctggctctgcacggccatggtctgttccggagtgctgtgcaggccgctgtgggagccgctgtccccgaggctgtccgtcttctgggctggccggtacctaggccaggaacacgcataccatcatgaggcccagcagccctgctgcgggtgggcccaaagactggggggctgggcaggattcagtcaggcatgtgtgtgtgatgtttacaagttgcggtcaaatacacataacacaaaagctaccatcggaaccatcttgagtgcacagctcagcagcattaagcacattcactggttgtgcaaccctcaccgtcgtcatctccagaacttgatcatcttcccacactgaagctctgtctccataaaacgctcactccccatccctgtccccagcccctggcacccctgatctgacttcccgtctctgtgaatctgacgactctagggacctcctaggagtggggtcacacaggatttgtccttttgcaactggtctctctcactgagcgttatgtcctcaaggtccaccgagttgtagcctgtgttggaatttcctcctttttaaggctgaataatattccatcatatggatgaaccacagtttgttaatggacacttgagaaaatagatatatattttccccctaacatttctctcttagaaaaaaaagtgaaattcttggccgggcgcaggggctcacgcctgtaatcccagtgctttgggaggccgaggcaggtggatcatctgaggtcgggagttcgagaccagcctgaccaacatggagtaaccccgtctctactaaaaatacaaaattagctgggcgtggtggcgcatgcctttaatcccagcgactcaggaggctgaggcaggagaatcacttgaacctgggaggcagaggttgcagtgagccgagttcacgccattgcactccagcctgggcgacaaaagcgaaactcggtctcaaaaaaaataaataaattaattaaaataaaataaaataaaataaaataaaagggagattctttgcgtgaatcacaaacatcttattattggtgcaatcttagaagttctgagactttcattttgagccagatggtggtggccagcctgtgcaggcagtgctgagaaacactcagcactttccaggcgctggactcctcagggcccggtgtgtggtgtggtgggggcagggagggagccggcttgagctggagcatctccagcggacctccctcctcaaatacgaagcggggccaggcctacagggaggcgggagaccatgctggcgaggtgtgtgtaaaccacctggctcagggcaggccgtgggcatcacacagacacaggctcaggctgtggcttccaaatgcaaatggcatcagcctgtccccctgaaatgtgtgtcgctgctcctaaaatgacacactgcctggagcacaggttcacagctgtctgccaggggcccaaattgaacaacagcagtgagctccagagtccatgtctgcagacaacgaggtacagaaggaatgctctggaaactctctcctggaacctccaactcctgggagtggctgtgtggtcaggagtcaatgggttacgcagagcagctggaatgggtttttgagccacacacatacacgggtggctctgtgcagagggtccagcaccaggtgtaaaggtgccacgtggggctattgcaatgtggcccctgccctcagggggggcacttgtggaggcacactgggaggcagtgatatttgaatgggccctaaaccaggggccagcaaactatggcctgagggccaattctgctgtttgtttttataaataaagttttactggcacacagccatgcccatcatcctcatgctgtctgtggctgctttcaggatgtagccaaattgaacagtcatgacagagactgtctggcctgcaaggctaagatatttgctctctggctctttacaggaaaggtttgctggctcctgccttagaagatgagaaagtttgtgatggatggagaagaggatcttccagaaaataaccagggctttccagccactggatccaaaggtgaagaagaagtcgtgacttgagcacatctgcttctttctcctggcttcttgggttatttgcagtgtcctctctctctttacttcctaagctttaaaaattaaaggtctgtgattccaactatatgacactggggaacggggaaactgtggggatggcagaaggattagaggttgctgcagactggggtggggagggaaagctgggtaggcagaacatggaggatgtgtaggactgtgaaaggactctgcgtgacactgtgatgggggacacatgtcattataggtttgtccaaactgtcgaatgtacaacaccaagagtgagccctgatgttgactgtggactctggggggtgatgctggctccgcggagggtcacgggtcatgagcaatgcaccgctgtgtgggggaggtgaatggtgggagaggcggtggggagcggggctgggggtgtagaacaactctctgtactttctactcaattttgctgtgaacctagaatggctctaaaaaatgaagtctgttaaaaacagttttaaacggttttaaaaaaagtctgaaaagttagctggaggaggttgcatcccagcctcctgtgtctcctgctagactcacctcagtctcagcagagggggataccttggctttcccaggatgctggagactggggagttatgatgagtttgtttcgtgttggagaaacacccacccctccatgctccaggggagagccagctcctcccagctcggcccggcacccacctgggcttctggtgcatgggctgctgccgcatggccatgtactgcgtgtcctcctgcagccggttcagtggtgagtccggcttcagacgaatcccatagtaatggtacttcgagttgcccctggaaaccaaacatcccagggtcagctccctttgcagatgtcctgaacaacaagacaggttgggattctttttctttctttcttcttttttttttttgagacagaatctcattctgtcgcccaggctggagtacagcagtgccatctcggctcactgcaatctccgcctcccgggtttaagagattctcctgcctcagcctcccaagtagctgggatgacaggcgtgagccataatgcctagcttatttttgtatttttagtggagacggggttttgccat[137 bp omitted]ctctgtcacccaggctggagtgcagttgtgcaatcacagctcactatcaggaggtcactaccaggaggtcactatcacttgacctcctgggatcaagtgatcctcctgcctcagcctctgagtagctgggacagctggcgtgtgccaacacactcggatggtagaagtgatcctcctgctgcagcctctgagtagctgacgtgtgccaccacactcggatcttgacctttcactttggcctctctggttcagcatttcctgaactgtgtgaggaatgtgatcaaggaattctgtacataatgccgttgtcatagagagtcctctctcacaggctagtataataaaggctcggacaagtcctgtgctgagaacaccaggtcagctttgttgagctccacatggcttatctccattattattaccattattattaacaactcttccccacccccttcaatcatctagtaacacgttttggaataaggcactgtttgggaaccattacattagtttattacgggagaatgatgatcagagggctttaaacaatttagttcagaaaacagctcacagagtccttacaggagggaagcattaacccacagacatggctgtggagacacccagctcacaggatgccatttctccagagctggcaacagggacatgcaggaagcacctgggtcctttctttttctttctttctttttctcttattattatatttttgagacagtctcactctgttgcccaggctggagtgcagtagtgcgatctcggctcactgcaacctccctctctcccaggttcaagaaattctccagcctcagcctccccgattagctgggattacaggtatgtgacaccatgcctggctaatttttttgtatttttagtagggacggggattcaccatgttggccaggctgattttgaactcctgacctcaagtgatcctcctgccttggcctcccaatgtgctaggattacaggcgtgagcaaccatgcccggcccttcttttcctttttaaatttcattgcaatagcagacagcctgggccctttctagatgaggtacatgtttagccaggtgctcggaggagggaaaacggggggaaatcagccttaatcctgaagccagcagctgggatactctgcaggggaggcccctccaggagcaggggctgtgtccccagagaccaggcttccctgtggcttcctcccgcttctgtccctcctctacgcatccacattccctaaggacattccctgtgaaggatgaaaaagtgtcagagaataagggactctggtcctcgtggatccaccgccacgccgtttatagacagccaggacaccggctttgagagcacgtgagtcagccccaaccccacaaaagcagatgccaagcctcgctggccacaggatcacagcctcagcaggcagcagcctactgcactctctgggccaccagctttgggttggaggtgctgctgtttctttctgttagaggagagttggcataattgcctgtgataagtctgtggcctgtgatgtcccggggctgccataggccaagagaaggcggggtggattggtccaggtacagcaaaagacaccaagaggccgggcacagtgactcacacctgtaatcccagaactttgggaggctgaggcaggcagatcacttgaggccaagagtttgagaccagcctggccaccatgtcgaaaccctgtctctactaaaaatataaaaattagccaggcgtgctggtgggggcccgtaaatcccagctacttgggaggctgaggcaggagaattggttgaacccaggaggtggaggctgcagtgagccgagatgacgccactgcactccagcctgggtgacagagcaaggctgtgtctcaaaaacaaaacactgagaaatggtaaatccagctctgctggataaaccagaggctacattttgtttgtttgtttgtttgacacagggtcttgctctgtcacccaggctggagtgcagtggtgcaatcgtggctcaccgcagcctcaacctcctgggctcaagtgctcctcccctctcagtctcccaaataggtgaaattacaggtgtgcaaatacgtgtgcaccactatgcctggctaatttttaatttttttgtagagatgaggtcttgctatgttgcccaggctggtcttgaactcctagtctcaagtgatcctcttgcctcggcctcccaaactgttgggatttcaggtgtgcaccaccacacctggcccagaggctgctctaaaacaaaaaaagaaaagtattgtttgggaaatttcaaaaggagagagaaaaccagagtgatccccacgtcctatcaccggcttctaaagccgacaccgtgggctacacctggccacagccaaggctgccgccaattgaaagtaactgcaagcactccagaggtggctgcgaatcaggccacctggaaaggaggaggaagcctcgcattttcccaaaagctccatttcttgggaaaggaagaggaagaacaggtgggctggggatcgtctacccacctggtgcccagccgccgcgttctcagccccataaacacagaacggatcagtttcccgaaggaggcggcgttcactgggtctagcttgtgctcctggcagtgccgaaggtagtggttgtaaagagaacttctggggagactcacaccttccgctgtttcataattatccaacagccactggagctgtaaaaagaaagacacgtctgcgtttgtcagaagcctgaggaacgctaacatgccaacgtggactcattaagagaattacttgcgttccctgtgttaccaaatgggatgaggaaatccatcttttctttctttttgaggcggagtcttgctctgtcacccagtctggagtacagtggcgcaatctcggctcactgcagcctctgtctcctgggttcaagcaattttcctccctc[224 bp omitted]agattaatgaatccctcattttcttttgcttattgattctttcatgtttagcctggttttcaggttcctggacttaatttgtaaacatctgggtgtgatcaggaactattagcttctgtcttcagtcccttaaatgaaatacccacacaccacacaggctttaacaccaaatcgctccccaacatacaggaatggagagaaattctgttgctgaacaggaagattgaagaagactcgggggccccacagccctgtgttctgtagtgagcagtgagctaacatgtactgagatcccttattgagggaggtacaaatggaaattcagtaaaatacacaaatgcttatatgcacggttttgtgtctaagtcaaaaggcaggacatagctacttgggaggctgaggtgggaggattgcttgagcccaggaggttgaggctgcagtgagctagggtcgcgccacactgtactccagcctgggcgacagggcaagacttcgtctctttcaaaaaacgaaacaaaacaaaaagatgggctaaatgagtcccgagccaaggactatgcctcgagaggtgaacatccagttagaagggctgcgagaactgtccacacgaagagctcagtccccacactgggcatggacgcaaaggtggcctgcccaccaactgatgccctcacccaggtgccttaaagactgcggcttaattctggtttccacctctccctctgctatcgtctgtcccctgatccagagaggtctgctatgtgaatacaaaaggcttgcactgatgcctgcgatttgcagaaagacaggaattccacgcacagaagcgaggcccgagtccagatcccatgtcaagagcgtcgggggaaaccagctgtctctacctggtcccctttgtgcgaggctgtcagctgctttgtctaggctgagccccgcttccagagctccgaagggctcctgctgcctgggcccttcagagtgggcagtgctgggtcctcagccctcccccaccgggcatgttgggctcctgcacagcccttggcctgggaagcccttgtccctgtgccccgcacaccccacaagacacaaagtaggcgtgtcccctgggaaatatctgtccactcaccacagcgtacccatggcacccccccgccccactgtcacgtttgcctgtctgtttgccccatccccacccccccaactcagcattagaagctggggaggaagaaagcattcatctccctttaattatttatttattgaaatggagtctcactctgtcacccaggctggaggtgcagtggcgcaatcttggcacactgcaacctccacttccaggcttcaagtgattcttctgcctcagcctcctgagtagctggcattataggcatgcaccaccacatctggcttatgttttttgtatttttagtagagatggga[140 bp omitted]cgagccctgcaccagcgaccagcacctcagaaccccttttatctcatctaagacccactcgatccagcctgtcctggcccctccagccctaacaggggttgacccagggccacagtggagtgaggacctgccctgggttctggaacgtttcacaggaggacaaacaggtcaaaggttcaggtgaaggggtgtgtggggcctgaacgcggaggtctcttaagccgaattgcaggtgagctgcggggctgagttccattttaggaagggggaagttaagtcttgggctggagttcagggtagagattgggaccagatgtgttactttggaaccaaagagctgaggacaaaacctccaaggggtgggaagagtcagtcacccagcaggggcactgcccacgtgggtgttgaggatgaagaggagcaaagcgtaagcctcgaagtgtgggtccaacctcacgtcctgcctctggggcaagccaggagggcttcagacctcctgaccacaagctcccctccagctctgctcctgcaggtaagtcccgtggccaaacatccctccttaccaaagggacaggagtggttcctgccacaatccctgagcttggattccggttccctggccgcccctgaatcactcaagtagcctatcacctcctcctcagcaccagggacccctcgccctcttgctaccacaaagtctgcctcctgccgcctgcagggccctgtgtgaagtgcagtgtcccccacccccccgccatgagtgcaggtgatcgttagcagttgccatcgttagcaggtgccaatttcatccgtccagcattgggtgccatgtgcttggctgtgcccataaccacagggagggacccccgccctcttgtcctttgaataaggggcagttaaaacaaaggaccctgagaagggcccggagtggagacttcatctcttcctcacttgcctctttgggaaaagggacatcagagttttcactttccatcaagtcattcacacccttcatcttccgactttctggactggactttttccaatacaatggaggcagtgttgcttttttctcctccaaagtccggctctggcagagtgcttggacccttaagagcttaagagctccggagtcttccctgtatttaatgctatgaatactatgaaccacaaccttgatgttgaagttagtgtgtgagtatgtgtgtgtgtgtgtgtgtgtgtgtgtgtgtgtatatacttttatatacttttttttttttttagagacagggatatatatatatatatatatttagagatagggtctcatcctgtcaccaccccaggctggagcgcagtggtgcaatcatggctcatgcagcctccaactcccgggctcaagtgatcctcctgcctcagcttccagaagtgttgggatgacagtcgggagctgcagtgtgggccctgaagcttttcttcccagtggcttcaccgtccggatttgtcatgtgtgctgattgatttatcgcctgttccccgcagactatgctctccctgagggtggagacggagccaggtttgcccatgtgagcatctgcaggatcctggagatgtctcaagcctggcagcagagaaagactgtccaaggaggtagatggggagcaacagagggtgtctgggtgaagaagccagaggcttcccttggtcattctgaggctgggggcacaggtgccacttcttagactgtcctccacaggcagcaggagccaaggccagtgacaccacatctcaaggagccaaatgacgatgcggattttcaggctaaaactgtgaggccagattttgcgggcggtgagctggaaggagcactggactaggagtcctgagaggttagagtataagactccatccaccaggaggacatactggctcacacataaaaagaaagttttggaacagatgatccttctgctgtttacccccgaacccccaggctatttaagagtagaatcctttgcttgggtaattacgttgacattgacactaaaaggatgcatagttgtcttgacagcaagtccttcttgctcaacatcaagaaaccacagagaagactgaagcggctggaacagtcgcgtctatttcctccctcttctgtgttgatgaacttctgggaggagaatggggttagaaccgaagtatggcttgcagactctgttcagggtctacgcctcaccagcaggctgggagccacttatgcaccgggccttcccatccctcggtgctggagcccacacctggcggcacgtcagactgcggcaagcatcacaggtcagttccgtgaaaccgaccacgagggtccagccgctccaaccacactcgcccacctcccctgctcttgagggctcgggtaccttcatgccaggaaaggcagcagctggacggagtcacctttctggtttgggcatgttctgcagtctgctttgtctgctgatatttgcattctttctgtgtcaatatcaaacacaaataagcagaacgctttccaaggaaatgtacatgtgtacccacatttgccacaatctgtcaggacagcacacttcttgatgaaatggatcaaatcattccttttaaggaaaaaaaatcccgaaatgccagcgcctccctctccccggccccccaacaaaggcctgtggttctgggctctttgcaggcacagcccctgtggacagatatcctcacctgccggtgggaaggcagggatcatgcccacctacctggccccctttgtctcctaagatacttgtttctattcctgggggcaaatttgcctgacactggctcctggtggtgagttagagtctcaccgggccatacactagcagctcgggcagctattccaaccgtccaggtgtgccctgtgttgacataatccgacttggaacatccaccttttcacccattccacaaatatttacgagagctggctctatgccaggccttgtttaggtgctggggatgcaacggcgaataaaagacaaaaacccctgccccctggaagcgtccgttcttgtctggcagagacccacaataaataagtaaaatgaaccgaatgagggctgatgccgagtgccgtcagagaaattcacctgggaaaggggatggggtcgccgccacggagggactggagggaggactgcaacggtatagtaagttgaggtggggtgggggtgtcaggcagggctcactgagaaagtgcccactgagtgaagactcagaggaggtgagggggagcctggggaagagagcttcaggcagagggccccacagtgcaaaggccctggggcaggtccgagcctggtgcattggaggaatagcgaggaggcccgtgtggctggagcacagtgaggagtgggagagagcgggtcctgcagggccttgtgggccattttgacaacactcggttctacttggagggccaaggggagccctggaggcttccaagcagagcagtgtggcgatctgacctgggttttagcaggatcactctggtggctgctgtgagaaggggctggaggctgggtaggggtgggtgctgacggctggctaggaggtggccgaaagaatccacagggacagtggcggctcgggaagtagtcgaagtggaggaggtggggggtgccacctggttctggatctttcttgaaggtgaggttgaagagcatctgggggtgggcatgagaggagcaaggaggcgaggacgcagtggggttgggggccgagcgcctggaagattggctgcccctgcctcagatgggaccgtgggcgggaggcgcaggggttgtgggaggcgcaggggttgttgagggtggaggccacgcactgagctaagacactaatccgaggcaggcaggaattccaagggaaaacagcggcacttctggacagaggccccttctgaggagctgccggctctagcaaccccactgtggcctgcaggacagcacggccatcgtgccaggctacacaggtcaccagctgaaggctaaatgacctttgacaatgtgtgtttcttgatttcaaagcaaaaagtcacataacccaaatacgactcttccacacgcagctctctcccgcagggtgtgcaagtgatgtgtttactttagcagacagcgccacctcatggtgacagagactcggtgaacctgctacggggtcccggtcggctggtagcctgagggcagcccggtggcccccaggggctgaggccgcctcttctgctcaagtcggtggcctgccacacccggtcgggtgaagacatgtttcatccccagccccggctccgtccccttccctctggaagagctaatccccattttcacggcgccatatcatgcccttttccagtttggacactgctagggggcctcctcctccctgggagtttccacgccaggctgaccatcagctggctggaaggttcttccaatgtgcagacctccaggccctgcagaccccctgggtccaagcccctagaggggaggcctgggaagctcctgttgaccggctgggtctggacaatgctgtctcgttttaccaggctcccagcacctgaatacaccttccctcctgagacagcgcagaggagggaaccagctccgcggaacacgtggccagctccgctcagagatgtctgtgaggggttccctaggtgggtttcccacgtcttccaccttctgccctcaaatgctaagctccctggagtgacttttcctccttttttactccctatgttcggcactgacctggccagaaccctgcacacggtagacggtggtctgacgtcaccagctggcagcaaggaagaggcgcacaggccctgctgctggggcgacctgcctggggctgtctgagaagggaggtctgggaggccactgggaaaatgggtctccagggcccagctgctcccacacacttggcttatctgccacagggtcaggctggcaggggaggtggcactgtggctgtgcccccgcctgacctgcagaaggccgctgcccaccacgacctcagtctcagccacaggcagccctggggacaatcgttgcaagggcacgtcaccccgtccatcagcagatcacgtgctttaactcctctcttcctctctggctctcacatttgccaaaacaagatctaagtttattctgcccgtgtgtgtggtgaactttttagaaagatcttattttacttcctttgcttcgagtcaccaagcccggaatcttactgatcacagctcatgacagaaggaaacaactcaacagcgaatcatcagtgagtaaaagaaacgagagattttaccttcagctcgggaatacgaatcttcatcggggaagcgacctgagaaagtctgcctttcggatgaagtgttagaaagcaggaaggatcccagcagccagagacaagcggctcatgcattttcccatagacattttttcttttttttttttgagatggagtctcgctctgtctcccaggctggagtgcagtggcgcaatctcagctcactgcaacctccgtctcccaggttcaagcgattctcctgtctcagcctccagagtagctgggactacaggcatgtgccaccacgcccggctaatatttgtatttttggtagagatggggtttcgtcatgttggtcaggctggtctggaactcctgacctcaagtggtacacccgccttggtctcccaaactgctgggattacaggcgtgagccaccgtgcccagcccattttcccatagacattttaactctcccgtggacttgctgcctgtccaggctctgcacccccatcctgcctgggtcacgcagccctctcgcccagggctgataccctggacccgcatgggtttgcgttcaggctgaagatggcctgatccttgctgaatggggaatggtattctgcacattttcccatgtatgtgctctgagtttaagactgggggctggggagatcctctctccaagcacgtgtggaagactcccttctccctgagttcatctacagggaggatgtcatccagcagtgacagatgacaggatgaccatgtcctacccagcctggagaggggcggggcactgagcaggggtctggcatggtgtttgttttgttttgtcttttttgcttcaagacaatcggcagaaggaaatatttctgccatttcttctagtgaccagccccctgaggcaaagggcagaggcctcgtcaggggctgcggtgagcaggtgaccacacctgtacctaacccataacccaggtttctggacctgtcctacatcactttctgcccccagaatcactcactgccttttgataacgcctcattttacacatcggccagcacagaagtcaggatggaatcacagtgaggacgggagtgaggacgggatcacggtgaggacgggagtgaggacgggatcacggtgaggacgggagtgaggacgggatcacggtgaggacgggagtgaggacgggatcacggtgaggacgggagtgaggacgggatcacggtgaggacgggagtgaggacgggatcacggtgaggacgggagtcaggacgggatcacggtgaggacgggagtcaggacgggatcacggtgaggacgggagtcaggacgggatcacggtgatgactggggtccactgaaggggacttcttctctgatgtctgaattctcaagagaatgtcagagcccagtttaagtgctagagagcaactactagaaggacattctgacttcgatggcccgtcccagtgttaagatgccgaacacatttccagctatgtgcaaaaccgaatcaagagcgtttggggagaagtgaaagcgatgagtctgagggggccagagctttccttctctgttgtccctggaaataaagacggagcctgccacgtcccccagtcccatcctgctacagggctgtgcagagctgagatgcccccaacctcctgtcatggggactgtgatcacggtcttctcccaagagacaaggggaggagaaaaatcctagacgctaaaatctgtatgaattagctgctttatgcttttctcaaattactgtttctttccaagagaggatcccaagaaaattagctaagagtctaaggcattcccgatcctatgtcattttctctcttttttgttgctgttgctgatttttgtattgtttttatttttcatatataactatactgcttatcacctgccaggtattgttgaaagtattttacgtacattaaataatttactccctatgacaacccgaggaggtaggtgttgttattatctaccttttacaaataaagaatctgtcttgatttctccttcattgctgaagggtattttttgctggatgtaggattctagattggcttcccctcaaccacctttcacaaatgacactttaaaggtgtcattttattgtcttcttctttttttttttttttttttgagatggagtctcactctgttgcccaggctggactgcagtggcgtgatctcggctcactgcaacctctgcctcccgggttcaagcgattctcctgcctcagcctcccaagtagctgggattacaggcgcccaccaccatgcccagctaatttttctattttaatagagacggggtttcaccatgttggccaggctggtctcaaactcctgacttcaagtgatccacccgccttggcctcccaaagtgctgggattacaggtgtgagccaccgcacctggttgccttcatttgtcttaaaaatgtctatgcaggttacaagcagagcagggacaggttgccaggtcagacgcacacttacatggctgttgagtaaaccgcttttgtgtgatgtgattccttcgcttttttggaggttttcaatcgccatttcaagctaaagaaaatgtgtgcagaaacaaaacaaaacaaaatggaaaaaaaaaaaaaggaaatcagatggttagcatcagccaagatttgtttttattaatatccaaataatgattcgagctcctacaaaataaaaatgaggctccacgcaggcagggcgggggtgagttaaattgtgcatgaaagctgcggtagggagtgttgcttcgcacacgtaggtaagcccgagagcccgtccaacagaagcagcagaaatcatgttgtaaaaacttgctactgaactttaacctggcatatgtgtgtgcacgccgtagcattaatatgcagccactgcatccattccagtgtcagccaagccagcatcatagtcacctgctcctttccccacgccacatcgatggggaaccagaatgaaagcaaggagagatggcagccttgactccccagccaggctgtcctgtcgcaaatcccagggtctccccgctgctggaggctttgggaaaatagcagcgaggccaaagactcagaccctgccaccaggaggccgtaggatccagggccactggacactgtctggcgaatgtttacccagtgggagctgtgcgaagaagatttttggaaaagagaaaagagttttggaagaaagagttgggcagctaacagcagaacttcctggaggaaggggcttttgagttggatcctgaaggacctgatggaggtggggagggaggtgggcggcaggtccacgcgatggaggaggcacacagctgtgcgtggccactaaggcattcgcacgcatttggtttgtcctagactcgcacacggaaaacagcgacgtaaaatctgctgcagcccaccctgacgaccagaggactgaagcgggaggagatgaacttgaagtatatgcttcctttcttaaggaggccaaagacttgacacttctgcaaagagcaggttgagtgtgtatttcagagagcaggcgagcggagctgagttcaagaatgagagggtaactgcttctcccacggcctccgaccacggtggttctgccttctctcattagctacccttgcttcaagccaaggaggacgtcagggtcacctttaagaagtgcagaaggtacactggaggaccaggggaaagtaggatggtgagacctctcccacccatcagcctcagggtgcaggcgatgagaaggcaatcgccacctctatgatagaaaaaacacacatgccacccccatgtcttggggccattctgatctgcagcttgggcagccacgtgagtactgccctgtggcaccttccctgtgggacatcgctcacctatgggtgccgggagagcagagtgcatgacctctggaagtctgccctaatctcagggggccttgtccagtgcccagcagactgggaaggagaagaaaacactgtctctccaacatagtgggtctcaatcatttggtctattaaaaaatacactattacaaaattttgagatttcaccacccacccctgaaaaagagctttatttacttatctttttcttgagccagagtcttactctgtttcccaggctggagtgcagtgatgtgatctcggctcagggccacctctgcctcctaggctcaagtgattctcatgcctcagcctcctgagtagctgggattataggcatgtgccaccacacccagctaatttttgtattttttagcagagacgggatttctctacgttggccaagctggtcttgaactcctggcctcaagtgatccgcccacctcggcctcccaaagttctgggattacaggcataagctaccacaccctgcctgcttttgtttttaaaagttaaatgtattatttcccttattagaaatcaaaatagataatttttaaaaagatgtattaattcattaaaaaataataaacccattataggttaacacttgaagaataggtacactttccaaattaaaaaaaaaaacaacaaaaccaaaagaagagtggaatgattccgcatcttcacaaatctgtagagtgcgtgacttacagaagacaactctacacatctacttctgtatctccatctgttattgtatactgttttagttgaagtacattgaaaaaacttggcctcacacagatatatagttggaaaaggagcactgttttaatagccttttcagataactggggatatttttacttgatactatagcaacacttgacagctggtaatttcttaaaggttagctgcaatgtggaatctgaaaccatatcaacgagcttttcatcctcagttacattaaaatccattaatcttgagctgacatccatgacaatggcagagtaaggaactctagaacccatcccttcacaaaagcagtcaaaaaatgggcaaaaattgtcagaatcgactttatcagaactctggaaatgaattaaaagattatggcaaacaggtgaacccttaattaaaaaaaaaaaagatgaaacttggcatttaaggaaattttcgtcagatcactagctgaccactaaggtaactgaatagagattttggccgggcacggtggctcacgcctataatcccagcacttcgggaggctgaggcatgtggattgcttgaggccaggagttcaagaccagcctggctaacatggtgaaaccctgtctctactaaaaataccaaaaaaaattaggtgggtgtggtggcacatgcctgtaatcccagcttctggggaggctgaggcagaaggatcgcttgaatccgggaagcagagattgcagtgagccaagatcacaccattgcactccagcctggccaacagagtgagactgtctcaaaaaaaaaaaaaaatgcagattttacaaaattagttcagaaaggtcatgaaacaaacgatcaacaacacctataagcagcaacagcaaaccctggggagaacagaagaatccaatattcagcgtcaccatgttaaactattcaaaatatccagttttccacaaaaattatgaggcacgcaaaaaaaaaaaaagaaagtatggcccatatgtagaaataaataaataggactatctctgagaaaatcgagccactggacttatgaaacaaagagtttaaatcaactatataaaatatacttaaagagctaaaggaaatcatgtacaaagcactataaaaaaccatgacaggctgggtgtggtggctcacacctgtaatcccagcactttgggagggtgagttgggtggatcacttaaagtcaggagttcagggaccagcctggccaacatggtgaaaccctgtctctactaaaaatacaaaaattagctaggcgtggtggtgggcgtctgtaattccagctacttgaaaggctgaggcctgagaactgttgagcctgggaggcggggtttgtagtgaactgagatcacgccactgcactccaacctgggtgacagagtgagattccatatcaaaacaaaaacaaaacaaaacaacaaaaaaacacatgagagtgatgtttcaccagtagaatatcaataaggagacagaaattgtaaaaaggaaccaaataaaatttctggagttgaaagtataatagctggaatgaaaacttcactaggggaggttcaacagcagatttgagcaggcagaagaaagaatcagggaacttgaagatgggtcaattgagattacccagtctgaggagcggaaagaaaaaagaatgaagaaaaatgagctgagcctaagaaacttgtgggacaccaccaagcttaccaacaaacacacaataggagtcccagaaagagaggagagggagaaagtggtaaagtctatttgaataagtaatggctgaaaacttcccaaatttgatgaaaggcatgaatctatacactctaaactaaatctatacactcaacaaactttaagtggcataaactcaaagaaatccacaccaaagacacattataatcaaactgttgaaaggcaaagacaaagagagaatcctagaagcagtaggagagaagtggcgtcacaaacaaagaatccagaatatgagtaatggctgatttctcaacagaaaccatggaggccagagggcagtgaaacgacttaatcaaagtgccagaaagcggaaaaacccacatgtcaatgagcagatgaatggataaacaaaatgtggtccatccatacaatggaataatttagccacacacaaaaaaataaggttctgacacaggctacaacatggatgagcctcatgcaaaagactatatattatataattccttttacataaaatatgtagaattggcaaatccctagagacagaaagcagattagtggctgtcaggagatggaagaagggacaatggagagtggctgctagtggggatggggtttcctttcagggtgatgacgatattctggaactagataatggtgattgtaccacactgtgaatgtattaaatgccactgaactgtccactgcaaaatggtgaattttatgttacatacattctatctcaataaaaaatatacatataactaatttcaaaaagtaattttagtctcccttgcaacttgaatgagtattttactaatgggtatggttttgtaacatcatatactggtcacttgaaaaacatgagtttactgagtttgcagatcttccagacattgccacatttcattacatagtgtcaagaaatcacattcattaatatcaccaccaacctcatcagaaaagtcactaactttgagaagttgtcaggttcctggttggcagacacaactccaaaattttcatttctttgtttaaaaacttgaattttatcattggccacaaaaacctgccagctgtttttcttaatatgtcaggctttgttcatttttggaaacatgtctgccaaatacctgagtccgaataatcatagtttgtcattctttcaagcagaaatggagttttaggaaaaccatggctagttctgcccacacgtcaatcaagcacacacaggcttttcttggaggtggtcattgtactctggtggacttcccatctcatcacacacaatagtaaagagatgtgtgctcaagagttgaaatttaataaaattaataatttttactgcttcatcaaggacattcttaaatgaaactagtatttcctttctttcttctccttcccttttttttttttttttttttttttgagatcgagtctcactctgttgcccaggctggagtgcagtgttgcgatcttggctcactgcaaccttcaccacccaggttcaagcaattctcctgcctcagcctcccgagcagctgggattacaggtgcccgccaccatgctcagctcatttttgtatttttagtcgaggtggggtttcaccatgttggccaggctggtcttgaactcctgacctcaagtgatccacccgccttggcctcccaaagcgctggggttgcaggtgtgagccactgcacccagcctctttctctcctctcttaaaaacatcttttagaatgtgagcatgtggtgatgaaaaatacagtgacttctaggacagtttgatgcctctgcattcttttttaaaaaagaggtggggtctctctctgctgcccaggctggagtgcagtggcatgatcatagctcattctggagctagaagtggccatggtgtagggagggagaggaggtcattccccaaaaacccaaatatggagacacgagacagagagggccactcccaaacctgctgtagttaattcaccctctgttctaaaacagaacttagacatgttaccatagaaggagccaattcaagttaaaatgctaacaaccctttggggtctttatagagaatgcagattgtttttattttattattattattattttttgagatggagtcttgctttgtcgccatactgcagtgcagtggcgcgatctcggctcactgcaacctctgcctcccaggttcaagcgattcccctgcctcagcctcctgggtagctgagactacaggtgcgtgccaccccgtccagctaatttttttgttgttgttgtattttagtagagacagggtttcacca[133 bp omitted]atgactggaattttgaaggcagagtggtaaatcatagaattaggcctggagaagggaaaagcccaacgctgtggtccaggcagaggaggccagcagggctgagaggctgggggagggagatggggcattttaatccctttgtctgttcctcccaactcccacttggcagggggagcccccaccaatatctctgtgcacgtcctttgtggggcatgagatcacattcacacttgctttaattattttccctcagtctctatttagttctgcaacttgtgtttgttacttaatattttgtggctatctttctgaaccaattctgttgtttgtttctttgttttgagacagggtctccttctgtcacccaggctggagtgcagtggcacgatcacagctcactacagccttgacctcctgggctcaggccatcctcccacctcagtctcccaagtagctgaacatacaggcatgtgccaccacaaccagggaatttttgtattttttgtagagatggggtttcgcaatgttgcccaggcttgtcttgaactcctgggctgaagcagtcccacttgcttccacctcccaaagtgctgggatgaccagtgtgagccaccgcgcccagcaggaccgattcttagagccactgggatgacaggcatcagccaccacactcagcaggaccgattcttacagagccactgcgcactcttaacttcaacactcttaactaatccacggacgttatagaatatgatccattttctcactaatgtccttcctctggaccaggacccaatctgggatcacatactgtgatcattttgcatacggtgccatgaaagaaaacaggaaaataagaaatgggtcaacactcaagagatccatcagtagctaatcgattattagatcaatgatcaatttgtccctggttgtcttaacagcttgtcaagtgaggttatgtcacttcagacaaagaaggatgacttgtctggtaaatcaattgaaatgcttcagaataagtgaaaaatagtgctttttgtatgacagtctttaatcttgtcactacaggcaaatctgagactaaatcttcaaacatatctttcaaagggttacttgtaagtgtgaacctgggtacttttcccacctttgcaaaaaaaaaaaaaaaaaaaaaccctataaaaccagctttgaaagtgaagataggatcacacacttgccagaacccatggaacgcataccaccaagagtgaaccctaatgtgaacgggactgtagtcaacaataatgtatcaatattggatcatcagctgcaacaaatgtaacaaacaaacaacttcaaactgcaccacaaagggaactctatgaagttttaaaaaaaagtggtgataaatatcatagtgagagaaaaagcagatgtgccattggtgacattcctttatcaaacagtatcttgagtgtgggaatgtcaaaggcaggcagtgggaagagcgattatcatcatgtgtgttggctggcaaataattcgctctgatcattggacaaaagctctgctatgcaggggctgagcaggcttctggcagatggtaggagtacccaagtgatttatttttatttatttatttagagacagagtcttgctctgtcacccaggctggagtgcagtggcaccatcacggctcactgcagcctcaacctcccccagctcaggtgatcctcccacctcagcctccttagtagctgggactacagacacacactgctaattttttttttttttttttttgagacggagtctcattctgttaccaggctggagtgcagtggcacaatcttggctcactgcaacctccgcctcccgggttcaagtgattctgctgcctcagcctcccgatgagctgggactacaggtgcgcaccaccacacctagctaatttttgcatttttagtagagacggggtttcaccatgttggccaggattgtctccatctcttgaccttgtgatccacccgcctcagcctcccaaagtgctgggattacaggcatgagccaccataccagcccaatttttaagttttttgtagagatggggtctcactatgttgcctaagctggtcttgaactcccgggctcaggtgatcctcccaccttagcttcccaaagtgctagtattacaggcatgagccactgtgcccaggtgacttttcattctacatcttcactgaagagccaggctacagaagaagagatgtgtgtgactcctgattctgtcatgagctgtgccactgcgtggaggtgccatgggcctctgcgagccacctccatggaccaccaggaaggggtgctctctgaaccttttctagttctgagggctgcctgactggagagttgttctttgctcagatagactcttgtttaatttaccgaaaatttctcttttaatggtattatgtatcgggtatcataagacacccttcttgggcaaaaagaaagctgtcaaaggcagaatatttagcttgttaaactaataaagtacagtaggacattttaacttcagctgcaattaaaatccattagacttttttgatcttctgctgtattagtcagatttaaactaataaaatgagaaaagatgcattaaagtatgagaaaaattttaaaaaagataaaaaagataaagactttttgtcttcgtcagggcccaccgtgtgaccctcagaggctgtgtgttttcacagcatggcctcatgtggcctctgggtcttgcaggaggaagggcccactgagggctgctcccagggtggaggggtctctttcttgttcccccttgagtgaccttcagcctcccctggacacaacccaaacagtaaaaaaggaggttccacttgggcagaaaggacaagaataaaactcccactttagtttccctgctccacgcagtgaaaaaaagcacaatagaaaacgtgtgtatcaaaaactcaccatttgggcaactaatttttaagatttataatatggatgacattttaaccagaaataaatactcgagaaaattggtcaccaagagtctggaatcactcgtcgaggctaccagtgaggacttgcttcagtgtttgtgctctgtctttaggactaagcgaaagtcccgagaaacaaaactctgacatgaacgaactggtagacatccaatgttgggtccagcagctgtatttctgttgcaatttcagggccatggttgttcttggctcttggaaagtctcgaatttctgtggcatccttgttggatgttcttatgccaacaacaagccaataaacaacagcagagcagtcagaagccaggaatcagattcgtatccaagatgatgactcccccagagcttggtggggggtgtgtgtgtgtgtgtgtgtgtgtgtgtgtgtgtgtgtgaaaacatagcctattcacggatttctaattgatttaataatttagttcttccagagcaacccacataacaaaccacagctccagggtggtggcccagggtctgagcagtatgtttgctgcaatgaggtaattctgaatccacagagaacatgattgtttctcagtaaatttgtgacttgcaatcctagtctattttactgttataagttgatgccgtttgctaagtcaaatgtgccacattcgtgacaattactgtagtctgcgaggaaagctttctgttccataacaactaaacctagttccacccagccaatcccaggcgggagaagtatgtctggtctgctggggctgcctggcctggggtgctaatggcaccgaggcactaagtggctaggggtagaagcagcagacactaccctacaatttcacagcctctagaaagcaagtgactcctcccgagaagagagggaggaggcatggggcactacgcctgtcctcaaagccagggcctgggggtcactctggacaaaggaagagagaggacagcaagattcatggggcctctctgatgccagggtgaccccagaacacaccagaaccaaaaacaaacaaacaaaaacacagagacaaggctaaaccaccaccttctatctcaggagatgagccttacaccaaaataagaagttattgtgtaattgaaagtcaatcaatgcaattcattatattaacaccccaatgaagacaaaaatatgctgatgcttacatatgtaaaaaaacgtttgacagaattcaacatctatttatcatagagacttccagaaaactagaaaaagaagggaacttcctcaacctgaaaaagggcatctgtgaaaaacccacagctaacatcacatacttagcagtgacagactgacggcttttcccttaagactgggaaaaaggcaaggatgtccattcttgccacccctgttcaacatttcactgcaagtgctagccagtgcaaaaaggcaagaaaaagaaatgaaatttctttttgtccatattggaaagaaagaaataaagcagttatatttgcaggcaacaa[132 bp omitted]aactccgtctctactaaaaatacaaaaaattagccgggagtggtggcagacacctgtagtcccagctactcgggaggctgagg[131 bp omitted]attacaggatacaagataaagagccaaaaatcaaccattttttaaatcctagaaatgaacagttggaaacagaaatttaaagatcaatgccaagaaaacccacaatgccatttacaatagctctccaaacatgaaatactttgatataaatctaacaaaacatgtacagaattttgtataagttacaaaatgctgatgaaagaagatctaaacaaatggagaaaacgtaccatgttcatggattggaagccttaacatagtaaagatgggaattctccccaagttggttcagtgcaaattagtcaaaatctcagtagcatttctttgtagatatagataaattgatctaaacttatacagaaactttgagtttatataaatagtcaacgcaatactgaagaataaagtgggaggaaccatcctcttcaattttagacttactataaagctatagtaattaagactatgctacttgtaaagggataggcagacagaccaatgggatggaataggacactctgaaataaacccacacacatatggccaactgatttttgacaaaggtgttaaagcaatccaatggagaaagggtagtctttttaacaaatgaggctagaacaacacattgtttcataagcaaaaaaaaatgaacctcaacttaaaccttacattatacaaatgtt[144 bp omitted]taaaaccctgtctgtactgaaaacacaaaaactagccgggtgtggtggtacacacctgtaattccagctactcgggaggctgaggcaggagaatcgcttgaacccgggaggtggaggttgcagtgagccaagatggtgccactgcactccagcctgagtcacagagcaagactccgtctcagaaaaaaaaaaaaaaaaaaaaaaaacccaaaacaaaagtaaaactataaaacttttcaaagaaaacaggagaaaatcttcataatgtgcaaataggcaaagagttcttagacatgacattgaaagcatgagccacagaagaaaaattgataagttggatttcatcaaaattaaaattttttttttctctgcaaaggacactttttagagaatgaaaagacacactaaagactggggaaaatatttgcaagtcacatatctgacaggagacttgtatccagaatacataaagaattctcaaaactcaaccataagaaaacaaccaacctagttaaaaaagaagcaaatgacttgaagtgacacctgaccagagcatctacactcacatgaaaagctgctaccatcattagctataaagaaaatgcaagttgcaaccacaatgaggtaccaccacacatctattagaatggccaaaaccaagagcaccagcagcatcaaatgctgctgacggagaggagcaagaggaactcttgtatgttgctggtgggaatgcaaaatggtgcaaccacttgggaaactggtggtttctgataaagttaaacatacactttctgtatgagccagcagcaattccacttgtaggtatatatccaaaagaaagaaaacatatgtccttacaaaagcctgcatgtgaaacttagagcttctttattcataatcaccccaaactggaaaccatccaaatggccctcaactagtgaatgaataaacaaactgtagtgtaatagaatattactcagtaacaaaaaaaagcaactcggattcatgcagcaacttgactgaatctcaaaggcaccagaatgagtaaaagaagcctgtctgaaaaggtcacaatctgtacgattccatttatacaccacgctagtaaagatgaaactacagcaatagggaacagatcagcagttgccaagggctggggatgggggaggttgtgactgccaagaaataccacgagggggttttcagggcaatgcactgttctgtgacctgattatacacaaatctacccatgtcaaaactcacaaggctgtacaccaaaaagttgattttactttgtgttaatttaagaaggaaaataaatgaaaagtaaacacgggtaatcgagttttaaatgtagagactctggaaaagcagataagtcgttattttgcatcggggcatggcagcgagaactcggcagaggctgcagggaaacttcccctgcttgattcagtccaggtgtctcatggatggattgatccacgcctctaaaagcttgatagtaacaacgataacaataataagagcaaaggaggctgcagcatccaccagtggagagatgcttgactcattcccttttcacaacagcccatgacgcatggcttgtcctcctctttataccaatggccaactgaagttcaaagaactctgcaggcctgcctatggttgcgtggcccgtctgaggctggcccgactccatcgtggggccgcctgggcccagagcagacgacagcccctccgggcctccggctgcctcttactcaccatccctgctgccgctgcttcgagaatactcatggcctaccctgctggtcccaagagcctcctacataccgtggcgggcgatgagcgggaggtgtgggccagggagtgtctggtgctgtccatccccccgtggatgagataggctcccgcgctggagacgatggggctccccccgacatccatggtgatgcccaccatgctgtgggaggggaccgctggcggggacgaggctgccacggtcacctgggcaccgcctggggcctcgaagtaagaagccgtgctgctgggggcgtacatctgaggctcggggttgtaggtgtaggctgttcgtctgttagaaagagagaagtcacgcatgggacgctgtcccatttaaatgccttgtctgagttcacagatatccagccaaacatcacgtaaaagctgcaacccagagaggccagacatatggagcaattcggacgtggcatatgacactcaaatgcagcgcaagttcacagccaccatgttgcaaaatctttaggacc[137 bp omitted]catagagagaaccatctctacaaaaaataaaagatttagccaggtgtggtggtgcgtgccggtagtcccagctactcaggaggctgaggtgggaggactgcttgagcccaggactttgaggttacagtgagctgtgactgcaccattgcactttagcctgggcaacagagcaagaccctatctcttaaaaaaaataaatacaaataaaacttaaaattgtaagtggataaatgggtcacatgagggagctcctgtgtggagatggagcagttctgtatcttgatggtggtattgttacacaaatctacacatgggctaaaaatgcaaagaaatagacacgcacgcacatgcaagggtacacacatgaacatgcaaagccacatgtactccacatgcaagcacacacgcaaaagcacgtgcatacagactggtagaactgaataaggcctgtgggctagttaacagttttaccccaatgtcaatttccaggggtttttttgttttgtttttttgagacagggtctccttctgtagcccagacttgagtgcagtggcaaaatcatagctcactgcagcctcagcctcctgagctcaagtgatcctcctgcttcagcctctgaatatgggtgtgcaccgccacagtagctggggtgatgggtgtgcaccgccacagtggctggggttagaatcatacaactccaccaatcacaaccctgaagtcacagccaggttctcatgtacagcccctgcacttgtgaggggagccatccaggccaaatggaaacagacaagcaggcgaaaggactcacgtctaaagtaaagtgagctgcacgggagatgcatactttcctaccccaagcatcacacagttacagagcagaaaactctagacatccttgcaacatggaaaatcaagttctatcaacattatacaaagctggagtttaacagaggcgaggggaaaacacacaggggtggatggtttctggatctcaaagactgagacttcagaatgaagagttaggattagcctttttttttttttttccaagactatcttttctaaaagtaaaaagtacaaaagtctgtgatttctgaaatctccacagggttatgatgtcctaatccctcagctcccaccccgctccttttttttttggacagggtgttgctccatcagtcaggcgtgatcatagctcactgcagcctccaactcctgggctcatgcgatcctcccaccttggcctcctgattacctgggagggactctaggcacttgtcaccatgtctggctaattttaaaattttttgtagagatattgcccagtttcctaatagcattttaacagtatttagtgaacacatcgccaaaagcataagggagaggaatttgcttgatgcctccccaggtggcaaaggctggagtcagggagagggttccgggtgtggcccgcgggagaagcacgcacatggctccattggtgtagacggcgtctcccccttccacgtactgcacctgggcaggatacacgtgctgcaccggctgcacctgaaacatcggatacgctgcgttaccgccagtcacgccctcgtgagttgcctgcagattattcaagctagacgtgtcttctattgcctttatgaacatttagtaccaaatgacaatgttcccgcccacagtcggcacgcctagaaagacactgaggagacagtaatgtacagacgacatattccaaacgggcccacacagttcagggagctgcgactgatccccagagctctgctagcgtgtctgtgcgccctggctcctctgtatacgtgggggcgggaccaggagaatgacaacgctcctccagtgcagtggaaactagagttgtggacagaggcccagccttggctcacaggactgtccctggtttctgttttttttttttgtttgtttgtttgtttttttgcgacagggtctccctctgtagctcaagctggcgtgcaggctgcagtgcacagggggctgagcagattagactctacatggccccaacaccccccgtgggtggccctggtgccccttccctggcagagaggaggggagagaatgtgatggtctgaacagagtgggaaggagcggcatgcctggagagatggggcaatggggggaccccagcacacccccgctgccctgccctcccctctctgaaacatcagttcagagcctcggctgacaggccccgagggactctagtccgagcagtggaagccaaacgctttgcacatgggacttcaaactctcaccccagagggcatcttagtggctgtctacatccactgaattttggggtgagaagatggagggccacagaagtgggcttgttcgggtgtcatggtgtcatggtgaccttcctcttgtgcttgaagctgcaggatggggctgacctgcccctccttggaccactgagcatggtatgcacttgtccaacgcaccacccccagaatcacaagttccaggggttaacatctgttgggtgatgccccaggggtggaagtcaaatgtcgaattctggggtccaagtgaaatgcagaagttacagaaagagctggggcaggcccagcaccagaaaagtggtggaagcttctggaatctcctctccttggtgtctctggggagtgccttgacagacagcagctaagacagagccactggcctgaggccctgcgtccccgctgggcctgtctggagccttttccttcctgtgatcctgcaaaccttcctagttctcatggacacagtcacctgacaaatgcctgtgaacagactgccaatctaggcaggaccctcctgaagagcggtgcattctctagggcctcagggctccttttagggaggagcctgagttaactttaattcaggattctgcagggcacagttggcaaactccggccctgagggccaaatctggcccactgcctgtttttgtaaataaagttttattggcacacagccacacccatttggttgcatatcatttatggctgcttttgcgatacaatggcagaattgagtggttgttccagagactgcctggaccacaaacccccaaaaatgtataatttggccttttctggaaacagtttgctaaccatgcttctagagtgtccccaagctgatgatctgtgttgctacttggctggtcagccgtgctttcaaactttgttcttagataattgaaatcataagaagcatttcctctgttgtgcccgcatctgagggtatggcactcactagcagatggttcctccagtccagagccctttgtttctgtctgcatttctacctgagctccacccagcaggtgcggggtgctcactggttccccaaatgcttgctgaatttctgaatgaacgaaagatcaccagctttcttggctttctgcaaaactatctgcagtaaatgatttttttaaaattgcacagcttctggaaaagtcttttggctaagaaactgaagcttacaacaaggaacagcagccacagaaaaggatgcatccttcagagattgttctggattgctgagtgctaactgcgccccggtttgcacggtgctgcggtgcttgtcattacctgctggggtacctgctgaactctggggagggagatcggctgcatctgggcccctttgggattggagctggctgcctggaccaacaccctctaaaagggaagggagagaaggccagttagacttgtcagaggtcagtgctgaggatacacacagaatgtaagatgctgtttgtctgttcatgtgctttttattaaaacataggcaggactgatcagaggcgacggcggggtgatggtcagacttgcacactcacaccgacctgggcagacacacggcaggtacgtgcaggcacacaaacaatgcacatacatacacaagtgtgcacatacactcagcccatgcaccacacatatgcacgaattgtgggcacacacacacgtatgcacacacacatacacggaagcacatgcaccttcacccgcccaggcagctttgcctctgtgggtctgtagtctgcagcaaggtgacactgatcgtccctagtacagaggggactgctggggccctctggatagccatccgcaccactgcgtgggagagcactctgtggcgcccctcgcttctgcagtataacccggacttgtttccattttctgatgaggttaatgaagccagagggctcaagtgctgcctctggctacagaatactcgagtccaggtgccctgtgtctgggtccctcgctctctgaccccactgctctccagcctcctaagtcaaatctgcacagtgtggctttgctatttttctgggagtaccgattggccacacaaagctatcaaaatgggaagggtcaaagtgaactcgagtcgagggaggaacaggagtgttttgtgtgtttattgagagctggggctttcggagtcattggctgcagtgctgtgatttcccggcatgaaccctgaatgtcacaggtagcagtgactgccatatatacatcacgaggggtgatgggtgaggacacgccatcccctgtgttgcaggagtggagctaaggatgaagatggtgctaataaggatgccagcgcaagggcattctgattccaggtgagctgggcgccgtgtgcttggagaattcacagggtcctggcaagtcctcagagagggaccacagtgatgaaacctgggacacacatggtggccgtgagtggcactgagacctgtccatggtggctgctgcagaggaaggcagagtccacctaggcctgggagagcctgagagaggggcttggcaggaagacctgagggctgactcctcttggacaatttcaagtgggcacggaaacatatcaattaggccacaactgctggcagggcgacggcgtctgatcctcacctcagatgggcttccaagacgccctccccactgccatatgtgcaagaaataaaagctaaagatgtctgaccatacacactacatcaaataaaccgcttcactgtctgcctttttgtttttgcggaattgtgtttttttgtttttgtttttttgtgttttttgggacggatttttgctcttgtcgcccaggctgaagtgcgatggcacgatctcggctcactataacctctgcctcctgggttcaagcgattctcctgcctcagcttcccgagtagctgggattacaagcatgtgccacaatgctcggctaatttattattattattattttttgtatttagtagacacagggtttcaccatgttactcagactggtctcaaactcctgacctcaggtgatccacccaccttggcctcccaaagtgctgggattacaggcatgtgccaccatgcctggccctgaattgtgtgttttaaaaccataatcatttctttttgctgtgctcctaacttttagattccagatcgaggtggtcacacggccacagtggacctctgcacactgtgatgagcctccagcctgtttcatgtggccggtgccattcgctttgtatttctgtcttctttatggcttatttcattccacggtagaaatccaggagcagagaaagcctgaatgtgaaaattctctctctgcgaattttaaagaatatgttcattcaggtgctaga[137 bp omitted]catggtgaaacctcgtctctactaaaaatacaaaaattagccgggcgtggtagtacacgcctgtaatccc[137 bp omitted]gccttttttttttttttttttttttttttgtcacttaggttggagagcagtggtatgattacagctcactgcagcctcaaaccactgggctcaagcaatccttccaccatagcctcctgagtagctgggaccacaggacgtgcaccactatgcctggctaaattttttattttttatttcttaaagacaaggtctctgtcacccaggctggagtgtagtgtcacaatcatggcttactgcagcctcaacctcccaggctcaggtgatcctcccatctcagcctcctaaggaactgggactacaggtgcagcccaccacgcttggctaattttttttttttttttttagagaaagggtctggctatgttgcctaggttggtctcaaactcctggcctcaagtaatctgccagtctcagtctcccaaagtgctgggattacctgtgtgagccactgcacccggccttacttcttaattcttaataaagcatttctgtgtaaaagggtcatttccaagtacaagaaaacctccactgaaagctaagaagagatcaagtcagatttgggagagtggtttcttttccattcatgtcattgtttccttgatgggatctttttaacaaatattgaaaaagccaaatacagttaaggaaattgtgcctatttcaacagcagcagcactgggactgagaagtccattcagaaaaatacagattcctctctttgcagatctgagcagctttcaaacccatagagatcgcgtccacactgtggccaccctgttgttgctgagaggcgcgcgttacctgcggggaggctggcacaggcggggctgccgccgagggacgcagagccacggacgctggcgaatccgctccaccctcggaattctgcatgctcaggtctaaagaaaggcggagagagattgggtgggcaagggctgcaagcactgaaatccgaagaggcaactaacaagttcaagggagggaaggagtaaccagctacattcttcaaagtcgaaaggcagagaccctggtggtactgcctaagtgaggagctgcggaaacaggctgcacaactgtcccacagaaggagagaggggccagagaaagttttccaaatataaaacccaaaaagggctctgtcagcgcacaatggcaggaattcctcaacagaaggccgggacactggctctgtgcccaagtctgagcaggttgaactattttgaagggctcaattgtttcctcatttacccagaaatcaaaagctctgggtgggtgactgccatttgggaagctactgcaccccaaacgacaacgggagaaactctaaggctgggtttccccactgtggcaccgttgacatttgagctggatacttctttgctgttggaggcccattctgggcacggcagggtgctgagcagcacccctggcctccacccattccatgccaggagcgccccctccccaagctgtggcaatcacaaatgtgttcagatattgccaagtgacccctggagggcagtgtgagaaccactggctagggagagaaaaggtgacctgcagagggagcaaagaaacagtacattttatcctgggctggataaaagtcctcacgaattttggcagtaagtaaaaactgccttctgttcaaagccatctttgcccacaagaaagtataaacatatatttctttgctgtcagaggcatacatctttcaaataggtagttttacaattctatataaaaccactcatttaatatcgtggcagatgatacaaatttgttccatgaaaatgctaaaagtcgaacagtcttcacttttaaataaacaatcggctatgttgagcatttgagacatagttaagtacacacacttaggtagggaggtggctttgtgatcaggcacaccagtcccccgtcctggcaccagctttgagcatgtcaccctcccagtgtggggtctccatggctcctgcctgctgggggtggtgaggactgaacctcagacatacatcgcggtgcccacgacatcgtcagaacacaatagacatttgctagaacttttacgtttctctatcacccccagaggttttatctcttataatgagtgaaaaaaattttaagctttttaaaaatgaaaagtcaaacttacaataaattaatttacctaaggaaagcagaaagggatatgtgtgtttgaattcgagtgtgctggattaatcccatctgtattgttggggactattccccgaccaccaccgctccccggcccccgcccccgtcccctcccaaacgccttcgatgccacccagagccccacggccagtgcctggggatttttctgttctgtgtgagcctgactcacttctcaccactagatggccccagagccacacggtgattggctggggcgttaactaaaccttacacagcccgcacctcctaccttctactctttcaaaagattgtaaatttcccatagtgtatttcctgagtcctcaactcactctctgtctttgacagaactgacctttggaatttttctgttacaagctgcttgtatttacagtttcctttaaatgtttaaatcagtcatttgcacaccatccaccatgctgttcccgtctgaagccaagcgggtagcatcagtgatactaggagataatttgactagaactctttgtgaaaggagtccaccagtgataaagtcagaatgctgacttgactaagaccagttccttgttccgcaggtggaaataattttgctccaaactccagaccttatttaagtaagaagaggccatgagagtgttggggataaatggcgagaccgtggtctgtccaccatggccagaatgcaccttccagaaagcaagttgttccacatcacaggcatttacacatgaatgtgttcccctaatttatttttattaattattattattgttttttgagacgaagtcttgctctgtcacccaggctggagtgcaatggcatgatcttggctctgcctcctgggttcaagtgattctcccacctcagtcccctgaatagacgagattacaggcacccaccatcatgcctggctaatttttgtatttttatagaaacggggcttcaccatgttggtcaggctggtctcaaactcctggcctcatgtgatctgcctgcctcagcctcccaaagtgctgggattacaggcataagccaccgtgcccagcctgttcccctaatttaacacactatttaccatgtgttgtcttataggtcagaccaatgagtctgtggctttttgcctgtgggcatgccccagtccacaaatgcttgggtgccagaaagcatcagcctcgttatcctgaagggtcagaggacagagttctgaatgctggggtgtggagattctggaagagagagagccacagaaggggtgagccctcaaatcttcctacaaaatacacctgaatctttggctaagcaactacaccacaaaggtgtgggggagataccaggggtcttggggaaaaaccagcagtgcaaagataaaaaaattaagtgaagatttcagctgctgcctgttgcaggagggagagtttgaatctagccaagtcacttgccttcaggggaactcagatgaacctacagattctacaatacatcattaatgatgtccaggacccagtaaaaaccatgagctatgaaaagaaacaggaaagtgtaacatacactcaaaagaaagagtaacaaataaaaagaaaaaagaaaagcagttaattataaccaaacgcaagataacccagatgatacagatagcattcaaggactaaagcagctactaaaaataacttcaagaacttaaaggaagttatatacataatgaatgaacatatgggaatctcaatcaagaaacaaagtataaaaggagaaccaaatagaaattctagagcaataactgaaacaaaaacttaactggatgcactcaacagctggttaaagataatggaaagagttagtgaacttaacaatagataaaaagcatttacccaatctgaagaatgaagagaaaatatatgaagaaacatgaatagaacaaactgtctaatatatatgtaacgagagtcccagaagagaaaaagagaatgtaagagaaaaaaatattgaaaaatggccaaacacctctacattgggtgatggatatcaacttagaggtccaaaaatctcaacaaaccctaaaaagaatacaaagaaagccaagataggtatgtcatggttaaactgttaaaagaagcagtcagagaaaaactacatattatattcggagaacaagggcacagatgatgactggcttctcatcaataacaatggcaaccagaagacaatggagtgacatttttaatatgctgggggggaaaaccctatcagcccagaattctatctccagcaaaactattcttaaaaactgaaggtggaataaagacattttttgcataaacaaaacctgataaaattttctgcctaccatgagaaatgctaatggaagttcttcagaatgaaaggaattaataccagatggtaaatttggatctattaggagtaaatatcacttaaaatgataaatacgcaggtaattataaaaaaccgtatttttatatattttatatttttccttttcttctcttaatttattttaaatacataaaactatttaacaaaaactttataacactccattgtggggtttatatcatatgtagatgttctccatgacagttgtaacacagaggatggggacaaattaagttatacattcaaggttcttttattttacctaaagtagtaacatgttaactctataaattgtgataaattaacaatgcacattgtaacctctgaagcatccactaaccaaaaaaatatatatacaaaaaggtatagctaaaaagctaatagagaaatcaaatgaaatcctacttaacatatttgattatctaaataaaggcaagaaataaagaacagagaaacaaacaaacaaacagatggcacaaatagaaagcaaatggcagaattgctttgctaaatctagacatattaataatatattaagtgtaaatagactaaattcttgaatgaaaaggcagaaatgatcagcctggataacaatcaagatcccattatatggtccctaaaagaaaccctccttaaaaataaaggcacacataggttgaaagtaatagaataaaaagagatccactgtgcaaactctgatcttttatttttatttatttatttttttgagatggagtctcgctctgttgcccaggctggagtgcagtgccacagtctcagctcactgcaagctccacctcccaggttcacgccattctcctgcctcag[208 bp omitted]ggctgtaataatcagacaaaatagactctgagatgagaaatattactagcaatactagagacattgacaagacaaggaatattactgcagataaaatttcatcataagatgatcaatttatcagtatgacatattgattacagatatgtatgtacctagtaatacagcttcaagatacgtaaagtaaaaattaacaaaactaaaggaggaaataaacaatcataatcggagattttaaacatccttcattcagtaattttgattactgaatcaaaattagaagaactaagcagaaatattactaaggatacagaatatctgaattatattatcaaccacattgatgtaattgacatttagagaacactacaatcaaaacctgcacattcttttcaaatgcacatggaatattcactgtgatgggtcatgttctgggccataaaataagcctcaatacatttcaaaataccataattatacagagcatgtatgcactttgaccacagtggagtaaattagaaatcagtaagaaggttagaaaaatgccaaatatttagaaaacttaaaatacaccttcaaaataatccatgggtcaaataataaaccccaaagaaaaatagaaaatattttgaactgaattataatgtaaacactttgtatcaaaatttgtgggcactggtacaaatattgtgggtgaaaaaaagaagtaaaattattaagaaaaaaaagtgggcacacctaaagcagtgcttagaaagagatgtttagctttatatgcttatgttagaaagatttaagaacgttttcaaccttaaaaagctatatagaaagacaaacaaactaaacttaatagaaagaaggaaaaacaataaagaacaaaattaatgaaattagaaactccacaaacaatggagaaaatgaacaaaagcaatatttcttcaaaactgaaattttttcagaagaagaaaggagctatcaagccatgaaaagacatggaagaaatttaaacacatactatgaagtgaaagaagccagtctgaaaaggctacatactgtatgattctaattaaacaacattttggaaaaggcaaaactatgaagacaatgaaaagatcagtggttgccaggtatcagagagagggatgagtaggcaaagcacagaggatttttaggacactggaactgttctgtatggcactataatggtggacacatgtcattatacatttgtccaaaccatagaatgtacaacaccaacagtgaactctcgaggaaactatggactttgggtgaaaatgctgtgttaatgcagatttcatcaactgtaacaaatgtacaactctggtgggtgatggtgataatgagggaagctgtgcatgtgtggaggtatggggtatatgggaaatctctgtattttcctgtcaattttgctgtgaac[132 bp omitted]gtgaaactctgtctctactaaaaacacaaaaatgagccatgtgtaatggcgggcacctgtaattccagctactcaggaggctgaggtgggagaattgcttgaaccaaggaggcagaggttgcagtgagctgagattgcactactgcactccagcctgggtgacagagcaagactctatctcaaaaaaaaaaaaaaaaaaaaagcaagtatttaaaaaaagttaattaacaacttctcctggaaagactgataagaaaagaaaacccaaattgccaatatcaggaatgaaatgaaatatatcactagagattctacagaaatcaaaatgataatagagaactattacaaacaactttagcccataaattcaataacatataaaatgaacacttttttaaaaacacaacataacaaaactgacacagatgaaataaaaaaatgtgaatgtaatacatataacaaaaaaattgaatatgttattggaaacttccctacacagaaaacttcaggcacatatagttttactggtgaatgctatcaaatactgaaaaaggaattattacacaaatgccatcagaaaataaaaaaagaatacttcacaactcattttatgaggtcagtaaaccctgacaccaaaacttaacaaatatattacaaggaaagtgtttagactaatatctcttatgcacatatatgcaaaaataatttaaaatattaataaatcaaattcaacaatatataaataatataacccacacttagattatcaattgatttttttttctaatggagcctcagctcttttcttcctcaactggattttcacaaaggtgtcaaggcaattcaacagagaaagaagtcttttaaacaaatggtgatggatcaacagaatatccatattggggaaaataaatgaaccttgacccctacctcacaccatacataaaaatgatttcaagttagaacatgaacttacttacacacaaaagctaaaactataagacttctcagagagaacataggaggttagacaaaggtttcttagaatgcacaaatcagcataaaagaaaaacttgagaaattagatttcaccaaaatttaaaacctctgctcattaaaagattttgctaagaatatgaataggtaagccacagcctgggagaaatatttgcaaaacatgtatctcataaagggctttgatcctaatatatctacatctatatctatatatataaactcctacaattcaatataagatgacaaataacttaaaaaaatggtacttcacaaagcaagatatacagatgcccaaaagtacatgaatagtggtcagcctcattagtcactagggaaatgcaaattcaaactatatcaagatatcactaaatactcactagaatggctaaacctgacaagtctgacaacatccaatgttgtaagtacatggagcaactaaaactctcacacacccccatgtgtagatatgaatgatatgaccacactggaaagaggtttggcagttttctagaaagttaaacctgccctttaacccagaattcctcttgtagtttttatccaagagacatgaagacatatctcttcaaaaaaataataacaacttgtataagcatgttcatagcagctttttgtttgttggtttttgttttttgtttttgagacagggtctccctcaggataaagtacagtggcacaatcacagctcactgcatcctcaacctcccaggctcaagcgattctcccacttcagcctcctaagtagctgggactacaggcacgcagcaccatacccggctaatttttgtattttgggtagagacagggtttcaccatgttgcccaggctggtctcaaactcctgggctcaaatgatctgcccacctcagccttattcatagcagtttgattcagtcaccaaaaagtaaaaataacccaaatgttcctcatcaggagagtggacgagaaattgcagattatgatgatttaaagattcatattgaaaaccctaaaacaaccactaaaaatggaaaagaagagcatagctaaaaagctaatagaggaatactactggaatactcttcatgaatagaaaggaattaattactgaaattcacaatgcatggatgaatctcaaaatcattacgctgagtgaaagaagttgagtccaaaagagtagatgagtagagtggattaaaactaaagttaaaaaaaaatcataatagtgggtgggggggcaggtggcggtgggcgagagtgactggaaagggacaggaggggacactccagtgagatggacgcattctgtatgataatacagtgtgcggttacatggagtcgtgatttgtcaaaattagccagctaaggtttgtgcacttactgtatgtgaattttaacaatgacaacgaagcctgtaaaaatacaagggtggagaggaggacggagagtgggtacaggtatccaggtgttataagaatggcaggaccctgacaccctgtagagggtggtggcttcataagtttcattgcattgtgtatttactttgtggatgtttgaaatttccatgataaggagttaaacaaacacacacacaagacaccagcgatgagcaggagtggctcatgatcctggcggtgcttccaggtaagcgcagtagctcacatggtcctcccagaaggggtgatgctggatcctgagtaactcctccacctggcagaggagagcgcagcagagagtgggcagagggcagggccccgagggcgtgggtgtactcaaggtaaagtccacagggcacagggacgcacactgtggagcacctttgcagcacccagtttgggaacccctcaatccagtgcaagacagtagatgtgagtgagtggaggccatgcttcttctctgaacctgaatctgctgtgggaacttggacccattcagtgactgccctgccgtccttgctttctcgcgttcctttgtcctctcttctgtttttcttcctgtggcgaggacctgggcagtcttactttgactgccttcccctgtgtcctcttagactgggttacaggagcctcggaacagccaatataaaggggaggggccgcaacacgacctgtcacccagcctggccctgcctggccaacgggcttggctggcccaaagctccctccctcgtgcctcagaaatatgcccggagtgctgtttataagctgagcacgtttcatttaccatctggtccaagatcagggcgggcatgaaataaaggggaaaagcacagaaccagcggcgcaatttcccctccttggccggcaccagcctttggaatccacgaaacgctcatttgaccttgaacgaacattcaagtgaaccagatgcgcacttgaccttttggagccactgctgagtcaaacgcgccagtgggaacatctcccgtggcttcctgacttcatgtgagggggcacaggagagacgcagctagaagcagccctggactacggccgtgatgaatgaatctgcctgggcacaaagggaagaggcttctgtttacagaaaaatactcccatcacctagtaaccagcaatgtcaggaaaggaaatgcagaaaacgctgagagcaatttctgggcccgttcctggctgagccgctgactcactgcgaccttaagcaatctctcttctattcctgttcctccatatgccaaatggagctgtcacctgcctcacatagttcagatcagtatttagacaatgttttgtcatctttggtgataattggggcagagttagctgagtggttttagttaccttcattctgattggctgatgagcctcggtgtttgggaggcacgtggcctcctccggccatcagctcctcctctcctggtactcgctggcctccagatggtaccagagttcatctgccctaagaaagcaattaatttcctccctctgaacaagaaggaacaagcccggagtgctctcaggagtaccagttgcttcaaagcccagattctgtcctggtagcttgtcttaacactcccagtgtcattaggctgcccagaaaagtcttgtccgtttccttctcccggctcccctctgagggccaggtcctcggagtaagtgatgcgtgttttaagattctgtcctcactgttcaggcttgtgtggcctggccccacgcacagggaggacacctccaagccatctccttgccgaaaagtggattctcgaaccctccttgatggtggaaccatgtcctttctggcaccaggattactccctgtggacccagttggttctcagtgccaagagttattactctgccctgataatcaccaaagatgacagtgtgtgtccccacttggcactgtggacattggggacggatccatctctgggctggggccgtcctgagcactgcagggtgctgagcagcatccctggcctccgctcactccatgccaagagcacccccagttgtgacaaccacagatgttcccagacattgcccagtgtcccctggggcgcagaaggacctctgttcaaaatggatttgtgatgtctaagaaggggtctggacaaacagcccccgagtaaaacaggcctgtagacagggtgagaacaggaagatgaaaaaggagagtaggcaggatgcaaaatcatgacaattcagccaggcaaggagtgtgaaataaatgaacaggaccctctgaaggctacccacacattccagagcagcaggcttcaatgcacaccaagggcaaccatcgttccctccgtgcctaagccacgggggtgcccgtcattcctcacttttgggttttttttttttctcctcttgtagcaatgggctttcaaggactggagctggctccgagcttctctgaaatcaagtatcttcagaattcaaattcctttttcttttcgtaagaattgggcttctgttcctgttttcttctcaggagccaaactttccctcctttctctagaaaaggatcagaaccaagcccttgacaactggcctgagaaagggctgtttgcagactggaagggggatgggggagtgcagacacccagtaggcccttaagtcgcaggttctaatcttcagaggctgagagcaggctgcgctgacaaggcctcccctaagccagggacccccgtcttaacagtggaaacacccgttccttcccctttagaaacctgacttttttttttttcagacagagtcttgctctgtcacccagactagagtgcagtgatgcgatcatagttcactacagcctcgacctccctggctcaagtgaccctcccgccttagccaaccgagtagctggaactataggtgagcaccagcacgcccggctaatttttaattttttgtagagacaggggtcttg[131 bp omitted]caaactaaagtatggttacctcatctctgatgtggtctgattttaactgccatcaataatataccaaattcagggtgaattttgaattaaaaaaccaccaagtcttcatgacactttcacccagcaaatactcttttggcaggcaacctgattccactgcttctagcaataacttcaacaccacaaaacttggtttctaggaaatggaaattctccttaggttatggggtgccctaaagtccaacacattggagtgaaaggtaactggataccaagctagaggccgagcagcagctggtgctctgtcccccaggagtggatatctgtcccccaggagtggacatgagagtgtcacacacacacagacgcatgtatacactccccacgtatgcatatacacaaatatacatggacatacacatatacacaaacacacacacacaaacacatgtacatacatgtatacacaaaagtacacatgcagacacacatacatgcacacacatacaccacctgacgcaggataatatgagaagaatggccaaaaccactcagaagacacgtcattttcttactccatacatttttctattaaattgaatgttgactcctcccactagacaaaaacaacgattcttgtagtaaaaagtgatgggggggagcctgtgttcacacatccacacacatgcctttgggagaaagcctcaaagtacatttttttctctgtacttttctccttgcaagattccattctaaaattgcaactcttttgtcccccttttctgacaccgcctctgcacctcctggctctcagccatgcccctgccatgctgtctcttccacttccttctaccccacaactccttccctgtgctgacctccccccactatctcacatccagactgtctacatccagttccttgcatcttcaactcccattttcccattatctatgatggcttttgtgctccaacagcagaggcgaggagctgagacagaccccagcagaagcctaaaatatgtactctctggtcctttacaggaaaaggctgctggcccccttcctgaaggttctagagccttccgtctccctccaaggacccaccgatcaagcctgcaatctggcttctgcacaggctccattctttcagcttatagacaagctcacatcacacccatttgaggagaacatccactgccactgaaaccctgctctttatcctttatcttctcttgagatatggattcttttttatttgtaagtccagactctcaggagggagcctctgtcgtcttctctctgcattctcatgtctgcccactgttcttcttgaggtcctcacggggcagttttcgggcctcctctgaacttgtactctctgcagtgtttcgtgtcgctcctcgaagctctgtcctccctcgtgtctgggtgctgttgtcatctggtttcatttttccccctaatgataccttctcagtcccctgcactggtccctgcttgtctcccaccctcggcctccacccttgtgcccctcccctgtcacactcaatgtggacgacctcccggcaccaggactcccagcaccacccaaatcacctgactccggctcccttctccagctgcctcccagacctctctgcctgggcgcccctcaggtgcctcaacaagtccaagggaaactctccccccgccaaaattgctcctcttgcgtttcctaagccagggggctgttcaaggcactgggcatctccctgcgccccgggacacgtgtcgctggtgactcagcctgctgtctccacctgataccatctctgcctcccccttccttccgctcctgctgctactatttcagtgagcccctgcctccctatctcctacctggaaccaccacatccgcctcctaattggtctccctgcttccagcctctgccctctcccagccaattttctttcacattggggtgattcaaaagataacaatgtcttctcattccctggctcaaaaaatcctcccaagaattttcaccgcatagacagtgtgtgtgctaaatcaagggattaactaccaaggtgggggttccagaccatttcgatgtcgaaaaggtctgctgtctgtaggatcccttctttagagggttggagcctacccttcacacttacaagtctggctgatcaagaccttgtcacctgaagactgtccgtaggcaggcagagagccctgccccacagaatgcatccaaagaaacggaacatttggttcccttcctactcccggccccgcctctggatcttactggggagtcggctgcagccgggggaaaaagactttgcaacctccattatttatataaataagaacaaatgccaaggggaatgccgagtggctgggaaggaggtatgaccacccggagcagagggaggaggccaggcttcaggttcaagtcccaggcttgtcactcgcttactgactgtggcagtggccttggtttcttcatctgagaaaggggctgggagggggaagggaatgatatagctgatgtgcccaccccgagtgtggatcccagcaggtgcctgatcaatgaaatatgtcctaggcaggggcgggaggatccattgaacccaggagttcgagaccagcctgggcaacatagcgaggccccatctctacaaacaaacaaacaaacaacaacaacaacaaactgggggccggggaaggtggctgatgtctgtaattccagcactttgggaggttgaggccagaggattattgaggtcaggaatttgaggttgaagtaagctgactgcactactgcactccagcctgggagacagaggaagaccctgtctctaaaaagaataaacaagtaacaaaacaaaacaatgaaaaacaaccaaaaaaccaaactagccgaaagaaagagggacacaaccccaaggacaacagcagcggcagtagctggtggccagaccgagccccagactgcgggcaaagctggtatacgtgggggctgactgactctgaggaagccgtgaccacatcacctctgctctagacacaacacacacgcaactgaggctcagaaagggcgagccatgagctgaaggtcacaaagcaggaagaggcaggctagactggaactggctttggcttgggtttggctaagtcactcctttaggaggaggaagcacatgtttttatgactagagcctccggagccacagcttcccgacctacgtggagcttccgtctcttttctgtatataaatcgcttccccaaccccatgccaaagagaactccaaataacaacacaagcttagcttttgctttagaagtttctagaatttagttgatgctattggagctatcatgaactgatacagtccccgtggggagtgactgtatgagctcgaactggacttggacatttctccagccctctgtggttccagttgagaagtaagtgctcttcattcattctcagtaaccaggaggaaaaggtaaatcagcgtgacttagaatgatcgttccctctgtctatccccacaagcagttccctgtgcgtttaaagcagtgggtttttcagaatgtaaagatctgggggtcgctccctggccagtcgcgcatattcaatatctgctcgtcctttccctccccttccagagaccaatgtcacctgtctgtccttttctggtgcctggcccttgctggggtcacccacatcccctcccgtgagctgctgtgtctcgtatccctcctgtcctgccgctctcgctcttgctcctaggccgccttctccctcatgcatccagctacttggtttgaaactctcccctggcgcctgctctgtggggaaagccgggcttcctctgattccggatggagtgtttaaatgagatgtccacacaacccccaaggaccctctgattccaacggaattggagcctacgcctgccagacccccaggcctgagcgccagcccttcactgatcagctagcctctgcctgcaagtctaaggtctgcagaatcgagggaggccagcatggcacacagcggtccagactcgcagtgacaaggtggctgcagtgcatggagggccaccggaggctggcactggtgtctcctgcacacaacgcagggagggtgaggatggggtccatgcacctgccagggtggggatggacaagacccctccagcagggccaggcaggctgggcagccctctgtccctcaaagtccacccgcccatgacagctaagattaaagtgactgctgcgttgaagaaggagggaggcagagagacagcagccagcagctccaaaggggatcccaggcaagtgatgagcagtggggaaaccctctctccagtcagcttgtcatgtcatacaggctttcctgacctcagcaatgcggatatgaggggcaggaatacactctggggtggggccgtcctgggcaccgcagggtgctgggcagcatccctggcctccacccactccatgccaggaaaccccccgacccctgtctgacagccacaaatgtctccagacatcgcccagtgtcccctgggggcaggaccacccccatggagaaccacacgtctaaggccacacctttactccacacagcatttccagattcaccaaaccactctccgtgcttgtcccctcagattacttcatgtcatgcagctgttcacatctggcttcttggccagccagcccttcttgagaaaacaaagtctggatctatgtcatctcagcagccccctcacagatccctcaccccaaccccagaccctacgtagcacattgcctgcaaagatgctcaagacgtgttttgcaatgaacaagagaatgagcagcccgcctgctccgggctgctcacctgttctagccaccttcaccatgttggcctccagctcccgtcttcagctgagcacaggggcctgtcccaggattcttggaagcggcttcctaaggcatcatgcttttgtgttctccttctcttaccagcctttctttccctctcacgtttctctccctttctgaccatgagcagggctgcagtgcagctgctgatggtcaagatgaagatggggaatgtgccagtgaaaacctggcatgcggaggcctcacctcactcaccctctcctgtcccagcttcaaaatctttcagagcgactcatgctgccagagggtggaggagtggaccttgaaatgacaagtgacagttcctcagcagtagcatctcctgctttctcagcctggtgacctgacccggcagcacgcccactgggcacctgtgcccacctggggatggggtctcgtcctgcctgtgtgacccttcctcctgacagccatctctagagacagccagtgagggcagggcaacaggcagtgcatgttctttccacatctccatgactgattctggccaggaggaggctggctttctggatcccaccaacatcacataggggaccttttcaatctacctcctacctcccctccagtcgtgatttgattctggaatttaagaagcggagaaagagcctagttcaaattcaagaatttccatctaaaaccacagcatggagaggcccctttaaaaaccacctaacccagctctttcatcaaacagatgaagaaacttacctaaagatgttaagtggtttgcccaaattgcaaagcctgatatatgggaaaatacttccatgggaaataagaaaatgataaatttaaaaaaaattttaaatgaggctctaattcctgaaaaatgacttacttaaactggggactgggcagaaaataatattgtagaaggtagaacagcatttctttgggaggatttatctttttaagtatatagtggtcttctaccactatcctacaacaggttgcaggacaaataatgtattttaatctttgggggagtctttgtgtaagtcagaccttattcattttcattccaacaacactcgcagccattggatcctaattatcacatctaataaggctgatg[133 bp omitted]aaccccgtctctactacaaatacaaaaaaattagccgggtgcggtggcgggcgcctgtagtcccagctactcgggaggctgaggcggaagaatggcgtgaacccgggaggcggagcttcctgggcgacagaacgagactctgtctccaaaaaaaacacaaatgacattccattataagtttctgctgcaaaagaaagttgggaaatttgtttagatactttaaatagtcctaagattagctgaaatgccggtaacaaacgtgcaatgaacattttcttgggggcattcagcaacaaagtgaatcgtccttaaaaaaaatccatacaactaaagcgagtctcaccacgggaaccacaggagctgttttagtgaggggctggagtgtctgttacaggcggcacttttgcggctgttgctgcattagtcagattgcactcgagatgaatgaggaagaataaagtcttcaccaaaaacctgtcttggctaacagttctgaatttatagccctggcagtgggggcgggggctgggggcggggctgggaggaggggaagaaatgtgtcacccgctctgaatgaagttcaggggtggtgtttacctaagcaacaaacccttgtcaacaatcgctatctctggcttgccagcggaggaggtgggggagtgaggctgttttgatcaaaatccaacctgtggctgcaaagtgcccatcaacagggcactttgttagtgggaacgtgcgacctctcttaataaacataacatacacatcccactgagggccacgggtggacccaacttcttaacaggaacattgagcacatgaaaccagaaggtgctgggtccaatttccaccctcagccaaccctatctgtgaatgtctctacatgtgagccagccagggctcaactctttgctcttctgaaattcttaggcagcagaaatgaaggcatcgtgctgaaaagcgctccagaaattgcggatttatcagtgatgtacggtagtaggttggacaagtaatgattttctgaacaccaggaattagatcaaaaaagaaattccacttaagactaaaataagtctccagttgagagcagtctaggacatattcgaatggccagaagtttgtttcaatggggcctctgcgtttgtgcagcctgggagtcaacattacaatattggttctttcaagcagatcccgagtggatccatgtctgcctgttgtggcaaatcaaactcaaatttaatcagagaaaaatatatgcagatgttcaattaaaacctggagtccgcagtcttggcactgtttgcccggccctcattgtttgctaagtaacaacggttgccaggggcaacgcagtccactcccgtttccaagagcctgttgctgggcaaccgggagaatacttcccaaaccaaacaatgtcatcccggagcaaccccctctatctcacattaaccagatctaaaaaaaaccctctcaaatatgtaatctattattttcagaagccctaagagaaaggcaaataatctcttctctatagtaactgaggggaaaacagtttaccatatttgttctgaaataacaaaacccaaggaggaacaactctctctgaggtaagagggcatcacaggagggatttcaatccttcctagtactgggaggagaaagtgcccttttctccaagaggaaagaatctatttatcatcaaacaaacaatgtgggagagttcatagctgcacaagtgttttctgggcgaagtaaaatgaatcatggattaagctatttggaaaaaagtgtgaaaacagaggagttgataccaaattaaaacgacttttggaaatatcatgtacgtatggaacaagtgcaaagggaaccactgactcagcgtcagaaatgccttgtggggctttgccgggagggacttacagtatatctttgacatcactgcgccggctcttccctccctacccggagagaggaagacttttctaagaggaagccaggccacatcagatgcccccagatggcaggacacacaagggacacatatctccggaaagaggaggcacatggttgggcaatctcgacccatgaagggggaaaagaaaagggctaaactgaagctagtgcagcttttgttctgcctggagcagttcaggctgagcatggcttctctgaggctttgggaccaggagagggtgaagtggcaccaccacctttcaaggggaacacagagctctaagcagtgctcttgtttttggtgggcccagccaaggatcttaaaacattttgatagaatgagcaacatgtagctgcagcctcgatgggtcaacattttggatgataaaagcacacaatgctgatagatttgtgcatgaccaagcatacctttcaaggagctctcagcggaggtttgccctttgagacagacacagtcagtgcacagaaactgtttttttaagatatcatccaggagtcattcctagaataggaatggaatagacatgcctccctgagaagaaaggaagacagattctatactgttagaatttgaatctgtgttgcagggagatgaggaatttgaagccagactcttgggctgttaatgtatggctaagtggtgatgtggtgacaaccttgaatgctagtcctggaggtcaaatcaccagcagctggtgccatgggaggctttgcttaggggacacggctgggttctgcctggatgctgcatcccaagggaggcattgaggtgcggctgtgaggactccaaaccccatgtccagaaggatgagtaacagagatcctgtgtcattcattgatttcaataaaatatttattggatccatagcatgggcctggcattgaccagtcatcaaaacacaattccctgccctcatggagtttctattctagaccatgcgggaggataggagcatatggacagtaaacaaggtaagtgagaaaaatatgtcgtacgtcagatgacaccctatatcatatggtgacaagtaccagggggaaaaggaagcagacagaaggagtgctgggataggaaggggttgcaatttttaaagcgttgtcaaatgcttccctgggtgggctcattaaagagatgaggaaggtgtgggacggagctgtccagatatcctggggaagagcgttcctaatggagggaaaagccagtacaaaggccccgaggtgggacaatgcctggcttgaaactggagctgagtgaaccagaaggcaaggagaaaggcccacacaggccattgtaggggctctggcttttgcttggggtaaatggaagccatcacaaggtttgagcccaggaatggcctggtttgacttgcattttaaccaggcccctctggctgctgggttgagaataggggaagaaggaaaagggtgggagcagagagagcaatctggaggctaatgtgataatctgggcaagggaggggggcctggctgtgagccatggaggggcaaagccgtcagactctggataaacataggaggtagagtcagccagatctgctgacgggtcaagggtacctccaaggtttttggcaactaaaaggatgaggtcaggaaaattacccaagaaaaaggcctggagagcacttgggagttgagttctgaaggtgtaaagtgtgagaggctcctagacacccaggttgagatgctgagaaagcaggcagattacataagtctcaggctgaggggtgagctggagccatcagtgtatagagaatgcaggctggagccatcagtgtatagaatatatgaactagagccatcaatgtatagataacatagctggaaccatcagtgtgtaggggacatgacctagagccaccagtgtctagaggatgtgggctgaagccatcagtgtatagagaacatgggatggggccatcagtgtatagatgacatggctggagccatcagtgtatagagaacatgagctagagccaccagtgtatacaggatgtaggctggagtcatcagtgtataaatgacctagttaaaaccataagactatctgggctcaccaaggaagagcagagagaagaggcctagggctgagttctggggctgtctaccatttagagatcccaaagaagcaggagcctgaaaagaggccaaagaagtataagcaagtggtgtcctgagaaccaagtgactctggggctgagtggtgatcactggaatcagcaaagtggaggtcaccagtgattgtgacagaggagctccaggggaaaagtgtgtgcaaaagccacagaggttggagcaggttcaagagagccccaagtggagcagaactggagacaggaggaccagatggctcttttgaggaatttttgctagaaagataggaagaggaatggggaggcagctggaagaggaaactgagagcgggtttctgaaaatgaaagaaataatagcaggtaggacctaccaggagggaactgggataggagaaagaagggagacttgcaagtggatgttctttcatggatgggatgggatgggatgtggatgggatgggatgggatgtggataggatgggatgggatgggatgggatgggatgggatgggatgtggatgggatgggatgggatgtggatgggatgggatgggatgggatgggatgggatgtggatgggatgggatgggatgtggatgggatgggatgtgaatgggatgggatgggatgggatgggatgtggatgggatgggatgggatgggatgggatgggatgggatgggatgtggatgggatggaatgggatgtcctgcagaacacaggtgggcttggccagggctaggtgcatggatatgcatccaccagtacaggagagaagacagagtgtccaccctggaaggtgacaccaagtcatagtccttctggaggggggtcctggtccccagtcccattcttcatccatggaatccctgtgtttactcctcgccagcctcaatagctggctgctgggggcctccactctcagcagggtggacgggcttgaagccacacgatagggcctgggtataaagtatgatgacctaggtccacagacctcacatcagagcctccagcagaccctgggttcatagtcacatatgggctccatgtgaccaatacttgcccccaccccatggtcccacctcaatgcctgacagaagccccactcctcaggtttatgcacatgatttgcctttttcactgctttctttttcttttctagacacagggtcttgctctgtcacccaggctggagtacagtggttggatcatagctcactgcagcctcaaactcctgggccctcagcccagtgattgtcctgccttagcctcccatgtagctaggactacaggtgcacaccaccacgcctggctacttaaaacaaacaaacaaacaaattgtagtagcaaggtcctactatgttgtccaggctggtcctgaactcttggcctcaagcagtcttcccacctcagcctcccaaagtgtgggactgcaggcgtgagcccccgtgcctggccctcactgctttccttatggttactccatacctcttttcaaatttgccaaatggctaatctttccacactcgagtattattagaaatgagttttaatatacctatttttcttgctatgtcaacgtacaaacatgcatccttaaataagaaagtgttagagtcacatattaaaaatgcatttcttgctaagtcatgctcgaattatgcaagattgcaaggaaatttaatgcaagacaaatgagtgaggccaggaatcttgctgtgagagtttgggaagcagagctccctggctccagacaaggaatggactcagcctgacgggaggaggtctcgcctgtctttgggagggaaagatcctgtcggtacttttaagtgatcgtctatctttgaggcacagacatatctcaattggcccgggacagaaaatcaagccaagtcagagatcccctcagcaagacccagggatctctgaagaaatgaaaatgaagcgaagaaagacaaaattagaaatatttattccatccgtcatctctttgcttgtctcaaatgccaccatccaacccaatgagaacgacaaaaggacattctatttctgtccccatgaaagtttcaaccccaaagcaaaacctcagtgtgcgctgagaagatgcagcaaaagggtctttttgttaaactcattattagaattaaacccaaagagggaaatgttggaggtattttaggtttttaaactaaattagtcccaattaattctaagaagatacactaaaatcaattctgttttagaaaggcaatttaatacaaaagcttgaggggaaatgttatttttaaaatgtaaaaaggcaccttaaaacctgtaaaatattttaaatggctttcctattccatcaagttttgagaggggttttcatttttctcaggaaacattttctcccggtgtggggttggggatgacttcagacagggcctgaaagcagcgagcaactcacgctgtccaggaggggcgagaacaaaccctcagctttgtctggttctgtttttggtgtctccattcccagctccgtattaagtcagttcccaaatccgagcaaaagataattttggataaaaaaatggaatgttctaactccgcctgagagatggaaagagaaacagagatgagtctgatgaaacagaactcaaatcaccctcttcctgacccaccgcttctcttctgattcaactgtagatttggacaaattgccacctttcagacctttccatgttccaatattctttccatttgtcctggcttccagaagccttggcggcccaagtatccacctgggtgctgggtgaccctgcctgttgctgctcttggaaagcatgtttcacttctgcatacattttaaaagataaatatttgggccaggagcagtggctcatgtctgtaatcccagcgctctgagaggctgaggtgggagaattgcctgaggccaggagtttgagaacagcctgggtaacaaagcgagacctcgtctctagagaaaaaaaattaaaaattattcgggtaaggtgggtgtgcctgcggtcccagctactcaggaggctgaggcaggaggactgcttgaggccaggaggtggaggatgcagtgagcaatgattataccactgcactccagcctgggcgacagagagagatcctgtctctcaaaaaagaaacatgaagtcttccttccaaggacataacaaagaaaaaagagaaaaaaaaggcccctctctcttcagtgctgcctacggaggtggcagctgtctcctcctcagcatcatggccgccctcagacccctcgtgaagcccaagatcgtcaaaaagagaaccaaggagttcatctggcaccagtcagaccaacatgtcaaaattaagtgtaactggaggaaacccagaggtattgacaatagggtttgcagaaggttcaaggaccagatatttttttttcttttttgagacagagtctcactctgttgtgcaggctgcagtgcagtggtgcgatctcagctcactgcaacctccgccttccgggttgaagcaattctcatgcctcagcctccagagtagctgggattacaggctcccaccaccatgcctggctagtttttgtatttttattagagacggggtttcaccatgttggccaggctggtctcaaactcctgacctcaggtgatccaccctcctcagcctcccaaagtgctgggattacagacatgagccaccgcgcctgcaagggccagatcttgatgcccaacactggtcatgggagcaacaaaaaacaaagcacatgctgcccagtggcttccggaagttcctggtccccagcgtcaaggagctggaagtgctgatgtgcaacaaatctccctgtgctgagatcgctcacagtgtttcctccaagaaacaaaaccatcgtggaaagggccgcccagctgccgtcagagtcaccaaccccaatgccaggctgcgcagtgaagaaaatgagtagacggctcatgtgcatgttttgtgtttaaataaaaccataaaaactgcaaaaagatatataaaaacaaaaaataaatatttgaaatatttccatccaaatggaatttcaaaacaattaaagatggaaagaaggaaggctgaatggatgaaagccctctgaagcttactgtagagtggaacgatgaagacacagttgcatttctgtgtaagtcaaattctcttttttaccgtgcaaatttcatggttaagatgaggttgaatgcggacggctaataccagtaatttgggctaagcgctcctcttccgggagtctgagccatctgaattggctgtttacccagctcatactgatcaggaagtatctgagagggtgaatgcaccaataaaaagccacccagaccctcctctccagcaagtggaaagtgtgtgtctcgtcctcacacaggaatgactgtagaggaccacagggcgacttctaggcagcccccagacaggccggccctgggtagcaggaactcgttctgccccagctgaggttctgggcctcatcactaatgacccacagcagccaaggtcagccctcgggaagatggaaaatgaatgaagggcagctctgcccaaagcggcggaccaggtgggcaaacagagagccggggttttgtagcaggggtgggggtgcggtacaggaacagatctggagcttgtggcaggagttcaggtggaacatcaggcggggtacagatgccacagtgtggaggaagctcctcctctcatcccaagctagccccttcctaacctcaagtcaacgagaagagaaggtgggctagaacctttccaccttcctcttagcacccggcctgtgccggtgcatctcctcaccccacacagtgccctgggtacaggggctggggcttgaagggtgcccataacacactccctcagagcctggacactcagccatcgttcattcattcaacaaacacagtctgagcatctgccatgtgccggcttcaagtgctgaggacacagcagggaatgaaacagattgagtccctgaccatgtggggctgacccctcagggagagacagacgacaccatggacacagaacagcaggaggtgacaaatgctctgaagaaaaatacactcaaatgcacaagtggagtgcggcatgggccaggggcaacaaggtgacctggggcagtgacaggacagaggcagagtgaggtgaggaaagtgtcgccgctgagaaggctctgccagggatggtgctcggcaaggctgaggcacacgggacatgtggggtcacacgggtcacgtgaggaggccaccagagggagctgggggaatgctgggggttgaatgttgtgtccccttaaattcctatgctgaactcctcaccccaaggcagtagctttaggaggtggggcctttgggaggtgattaggtcatgagggtgggatcatgccctcccttatggaagggaccccagagagctctctctggcttcccaccatgtgatgtgaggacacagcaagaagacagccatctgcatcccagagggaagccctcaccagaacctgaccctgctggcaccctcttctcagacttcccacctccagggctgagagatgtgtgtctgttgtttacagccacccagtctatggccttttgctgaaacagcccaaacagattaagacaggaggagaaggaggaagaggagaaagaagaggaggagaaggtggaggaggaggaggaggaggaggagaagatggacttagagacacaaggaggccacagtggagtgtttggctttcgctctgagtgtgctgggaagctactggaaggtttagggcacagggacacaatctgacagatattttggaagtatcaacggtcaatggaagcaaacgtcagggctggacaaccaggtcagaggtgacaaagacttacgtgatagcagtgctctcatttgggagacacctgaagacagagccagccaggtttgctgacgggtttgacataaagggtgaaagaaagagaggagtcgaggctgacttaaggcttggggctggcctgagcacctagagaatggagctgcccggtgctgagctggggaagcccgtggtctggggagagacaagtgtgaggtcgaatcaggcacccagttttgggtgacagaagcctcagatgcccatcagatgacacccacatgcagctgccacctaggcagctaggtacacaagtccaggattcggggagtgagccaggctgcagacactaggacactggaggttctaagatgcatttcaactcttgtacctcggtgagatcaccaggaaagcaggtgtagataaagcagaaaagaggtcccttctcaagttcaaaggtcatgaacagttggaggatctggcataggggacagaggagaggaagaaagcagagggaatatcgagctctgaaatacacagcgtcacccctttacttggctttcggagcttggtgttcacaaaaaattagaaacgaggttgggggcggtggctcatgcctgtaatcccagcacattttgggaggccaaggtgggcagatcacttgaggtcatgagttcgagagcagcctggccaacatggcgaaaccccatctctactaaaaaataatacaaaaattagccatgcgtggtggtgcatgcctgtaatcccagctacttgggaggctgaggcaggagaatcgcctgaacccgggaggctgaggttgcagtgagccgagatggtgccactgtactccagcctgggtgacagagagagactctgtctcaaaataaataaatacataaataagaaacaaacgttcatcaactggaataccattaactaccttacggtgcatcctagctctaaaacaggaggctaggcgagggtgcctgggtccggtgcctgggtccagttcctgggtcctccagtttctagctgggtgacctcagccagggacttaaatctttctgcacttccatttctttgtccataaacggagaaaatacttctatctgtgttgggtggttgtgttaaatgagaggagtcctacaaagtgtggagtttaatggccagcccagcacacggaaaatgcccataaatgttcattagcgtcatcgttgtaattcacaccattataacgtaacccacataatttactgattttttgcagatttaaatatctgaaactaaaagcagttatgctgtttgctatttgtgatttcaaaaactcttcgctatttgtgatgttgctaagccctttagggagtgcctcctgctatgagctatattcattccagggcatatttgtggggtttgtcattttaaccaagtacttaatacttgtttctctcccagcatcttgccaaatgtggcagctctccttctagatgaacactactgcattactgttatagaaatgatattttaacatcaactcccttttcccttttcttccctagaaatccagtccttccatgagacctcggtacacacagaactcctcctaccacgtgcaaccttattctcggctgagcaactcataaatcgcataacaaaaacagtgattgatgcggactgtgtttagtgccatccttgccggtgagagggagtgagccagcaagcttccttaaatctctttagttctccaaaaggagaggccatttgccttctcatctatgccgcaagtttctggggcttgcatcattaacctggtggctttgccaattccttcgccagtgctgggtcaaagacaggcaagggcaccagggttagccatgagtgtgtgccaggggctgaatgcaaaacccgggagcactggtggctggggcaggtgggctgggctctgccactgcctcccccagcccacccaagaggggcgtgtgcctctgcaggaaatggcctccaagcatttctcaagacttacgagatgttcaaacctacacagtcagagacaaagagctagctataagtggggtctttttcccctcctcaaaattcatcctgcagaagtagacatgtgctaaacagtgcatggccacacaaatgcttggataccaatgttcacagcagcgttgtcctaatggccccaaagtagcaacagcccaaatgtttgtcaactgatggatggataaacgaaggcggccgggcgcggtggctcacacctgtaatcccagcactttgggaggctgaggcgggtggatcacctgaggtcaggagtttgagaccagcctgaccaacatggagaaaccctgtctctattaaaatacaaaattagccgggcgtggtggcacatgcctgtaatcccagctacttgggaggctgaggcaggagaatcgcttgaacccgggaggcggaggttgcagtgagccaagatcgcgccattgcactccagcctgggcaacaagagcaaaattccatctcaaaaaaaaaaaaaaaaaaaaggaacgaggcactggcacatgctgtaaacggatggacagtggaccctgaaaacattatgttacgtggaagaagccagtcacaaaaggccacatagtgtgtgattctgtttatatgaaaggttcaaaacaggcaaatccacagagacagaaagtggattcacagttgcccggggctgggaggaggaagggcaagtggctgttcatggcaggttcagggtttcttcttcttttcggagtgatgaaaatgttctgtgaagatagtatactaagacccactgaaccatacacttcaaatgggtgagctttacggtatgtaaaacagatctcagcacagctgtaaaaaaaaaaaaaaaaaaggtatattgacgacctgtccccagtggcattagtttaagtcataaaaatttagaaacaaatgttcatcaacaggaaaatcattaagtaccttatggtgcatcctagctctaaaactatgctgccattaaaaagaagaggtaccgtctccaagaaagaaagccaacatctgcagtgcctggcacacagtaggctctcaaatatttgcagaataaatttatgttgaaaaaaccccagctatacatactataaaataggtaaaggggccttaaaaagatctagaaggacacaagttatatgactaacagtgcttacctcatatgaggtgggatagacagaaagacgaaaagagaaattttcatttctgaatctcctgctgtagatggtggtccttcccaggagaatgttacttgtattacttgcatatcattttattttttgagatggaatcttgctctgtctcccaggctggggtgcagtgcacaatctcagctcactgcaacctccacctcccgggttcaaactattctagtgcctc[134 bp omitted]cggcctcccaaagtgctggaattataggcgtgagccacggcgcccggccattacttgcatatcattttaaaagttgtaattcattggtaaacattctaagacatgcaggttcctgtaaattaccaaactgtaatcctgtaaattaccaaacagaatggctgtttgtgcagggagtatcactgcgatttagtgtacttggtctagagtatgctgtcgctcttacaaccagaggttttcatgttaattcaacatccatcatgaagagaaaatataccagacaaacaaactgtggtaggatcacacaaggactgtgctccagcaataaaaggaacaaacgactgacacacgcaatgacagaatgaatcccagaggcatttatgccaagtgaatgtagccagtctcaaaagctgcacaatgtatgtttccatttatacgacattctggaaaaggcagagctatagaaagggacagcagatggtggccagaggctaagaatggggccagggtctgactacagagagaggttggacttgctctccatcctgtttgagatggaggttataagaatctgtgcaagtgggc[139 bp omitted]tggtggctcgtgcctgtagtcccagctacttgggaggccgatgcaggaaaatcacttgaaccagggagccggaggttgcagtgagctgagattgcaccattgcactccagcctggcaacaaagcaagactctgtctcaaaaaaaaaaaaaaaaaagtatgcaagtgtgaaaaaccatagaacagcaaacctaaaaaggcaaacacgactgtatgtagatttaaaatataaattaaaaaaaaaaaaagaaaaaccaggtgcatctactgagtgcccagccccattctaggctctgaggattctgtttttttagggatgggtcttgctctgttgcctaggctggagagtgcagtggcaagatcacaactcactgtagcctctaactccagggctaaagcattcctcctgcctcagcctcctgtgagtagctgggaccacaggcacatgcctggttaatgtgtgtgtgtgtgtgtgtgtgtgtgtgtgtgtgtgtatgtgagagagagacagagagagagagagagagaaggtgaggtcttgctttgttgcccaggctggtttcgaactttcagcttcaagcaatcctcccactttggcctcccaaaatgctgggattaaaacgtgagccacgacacccagcctgaggattctaaggtgagcaggtcagatgaaagtgctgctctcagggtgccagtatccttgtcaggcaagaatacacaaggttccagatacacaaggttgttcagtagagatccgggctgtggtgcaaggtgattgcagagggatagagccaggggtggtggtggagagggctcccctcttgatagccagttatgggtggcactaaggatggcactgagctgggacctgacagctgcaaagaaggggccaaccttgggaggatgtgggagagagcagcctgggcaagaggaatagctgtgcaaaggtcttgcagcagcagaggccctggacaaggtcagatgtctggagttttaaaattccaattgctgtcggggctcagtggcttatgcttgtaatcccagcattttgggaggctgaggtgggtggatcatgaagtcaggagtttgagaccagcctggccaacctggtgaaaccccatctctactaaaaatacaaaaattagctgggtgtggtgatgcacgcctgtagtcccagttacttgggaggctgaggcaggagaatcacttgaacctgggaggtgaaggttgcagtgagtcaaaatcatgccattgcataccagcctgggcaacagaacaagactccatctcaaaaaaaaaaaaaaaaaaaatccaattgctaagggaagccccaggaggctcaacccacaggcacaatataatctgacttacatcttttaaaagagcactcttcttagattatagacagaaagagtgaatgcaggaaaaccaagacaaagacattcactactttaaaaaagttcataataagtctgcttcccggccgggtatggtggctcacccctgtaatcctagcactttgggaggccaaggtgagaggattgattgaggccaaccaggccgaaaaggaagaccctgtctctattttaaacaaataaaaagaataattaattatgcttctaagacctgtctgtggaaccggggaaggaatcatatcattttataaacaaaccaagtaacactaagcccattgcatgaaggattaaataattaagcatttagttaacatgaaagtaaatgatggcttctatacatttttaatgcaggtaattatactctcagtaaatcatcacagcacacaaacattagcatgcttattaattcagtgttaattgctattggcttacatgtaccattatccaaaaattaaataatttgagtgtacactcacttttttaaacaggtacatataaaggtagatggagggctgggcgcggcggctcatgcctggaatgccagcactttcagaggtcgaggagggtggatcacctgaggtcgggagttgaagaccagcctggtcaacatggtgaaacaccgtctctactaaaaatacaaaaattggccgggcgcgttggctcacgcttgtaatcccagcactctgggaggccgaggcgggcagatcatgaggtcaggagatcaagaccatcctggttaacacagtgaaaccccatctctactaaaaaatacaaaaaattagctgggtgtactggtgggcacctgtagtcccagctactctggaggctgaggcaggagaatggcgtgaacctggaggcggagcttgcagtgagctgagatcatgccactgcactccagcactctagcctaggcgacagagtgagactccgtctcaaaaacaaaacaaaataaaacaaaaacaaaaacaaaaattatctgggtgtggtggtgcacacctgtaatcccagctactagggaggctactagggaggctgaggcaggagaatcatttgaaccaaggaggcagaggttgcagtgagctgagatcgttccattgcattccagcctgggcaacagagtaagaccctgtctcaaaaaaaaaaaaaaaaaaaatggtagacaggggaaatggaccagatgttgaatctagtttggttatagtcattgctggggattaatatagtaagaggagggtccttctctcctgaattgatgtctatcaggggttggaaagttttctttttttctttgagacagagcctttctctgtcacacaggctggagtgcagtggcgcgatcacagctcacttcatcctctaactcctgggctcaagccatcctcccaccacagcctcccgtgtagctaggaccacaggcgtgcaccaccactctcagctagtttttgtattttttgtagagatgaggttttgccatgttgcccagactggtcttgaactccagggctcatgggatccgcccactttggcctcccaaagtgttgggattacaggtgttagccactggaaaactttctataagggccagaaaatacacatttttggctttgcaggtctctgttgagactactcaactctgcctctggacagtaggaggagtgagtgtggccgctgcactcagcgcttttcagagccatgctagagcctggggcaaagaggaaaaagaagcagcagtgctgatcctgtctttatgtaaaatttcaacattttgctcatcatggaatttttttcccattatttttttgagacagggtctcattctgttgcccaggctgcagtggcacaaacacggctcgctgcagcctcaacctccctgggctcagggagtacgggcacgtgccactacccccagctaatttttgtattgtttgtagagacggggtttcaccctgttgtccaggctggtcttgaactcctggcctcaagtgatccacccgccttggcttcctagagtgctagaattacaggcatgagccactgtgcccggccttcatcatgaaattttttggcatttattttgattttttaaaatactgcattaaaacattgtgtatcttgatgactgtggatttttgtaggcactgccttaaattttgcatcccaggcgagggcctcactgcctcatgctagttctgaccctggtgctggtgctgttccaataaatctttatttatggacactgaaatttaatttcatatcattttcatgtgtcacaaaatattttgtcttgtttccaatcatttaaaaacgcaaaaaatattctcaactcgtggaaactaaaaacaaaaataaaaacccacagtagtgtgctagatgtagtctgctgacccgttttttttttttttaatttttattcatttatttatttattctgaggccgggtcttgctctgtcatccaggctggagtgcagtggtgcaaacatggctcactgcagcctccacttccagagctcaagtgatcctcctgctcagcttccccagaagctgagaccacaggtatgtgccaccatgcccgggtaattttttaattttttgtacagatggggtctcaccatcttgcccaggctgtgacccctatcttggatggcctttgggggaacatgtcttactcataattataggcagcggaaaatgcctgctagcgagtaggcactcaaacgtgtctgaataatttagtcccattttctccattcttaaattactgtttaggttgctttacattctcttcccagccccagatctccaaatacaggagatgagcacacgtgtccagggcaccccagacctcttgggcagggagaattctcggcagagaagaccggatatgggagtgtggtgtgggaatcgtctgtgagtgctaaagaaccggtcctccacctgccccaagctttccattaggctcaaaagcagagttagcccagttaagcgcatggaaactaaatgagttcgctgtgcattgttcagctatacatgaccacaggcaagataaatatttagggtctttattaaagctgtgatcctctgctttagcaggacagcgtagggacttactagaggcaaaccataaaaagcatatgcctcctagtaaagtaatgctgggaaatatgacgagtcaattactctttatcattaattgtggtaaaatgtgcataatgtacaatttaccattttaaccatgtttaatatacagttcagtagcattaagcacactcacactgttgtgcaaccatcacctccatccatctccagaacattctcatcttcccaaattgaaactttgtccccatgaaacactcactccctaccccctccccagcccctggcacccaccattctactttctgtcgctatggatctgatgactctagggacctcctaggggtggaatcacactggatttgtccttttttttctttctttctttcttttttttgagacagaatctcgctcttgttgcccaggcaggagtgcagtggtgcgatcttggctctctgcaacctctgcctcctgggttcaagtgattctcctgctgcagcctcccaagtagctgggattacaggtgcctgccaccacgcccggctaattttatatttttagtagaggctgggtttcaccatgttggccaggctggtctcaaactcctgacctcaggtgatccaccacccaccttggcctcccagagtgctgggattagaggtgtgagccactgcgcccggctggatttgtccttttgtgtctgatttctttcactgagcatgatgtccttaagcataatgcataatgtccatgttgcagcctgtgtcagaatttccttcctttttcaaggctgaatagtattccattgtatagatggatcacattttatttatccattcatttgttggtggacacttgagttgctgccacattttagctattgtaaatcatgctgctatgaacatgagtgtacaaatccctgtctgagtgtacaaatactgttttccaaagcagctacactattttgcacacctaccaacagttcacatgggttcagttccaatttttccatattcttatcaacatttttctgtctttcttcttttgggtaacagtcatcgtaatgggtgtgaagtggtatcttattagggttttgatttgcatttctgcaatgataactggtatgaagcacctttccaactgcttattggccatctgaatatcttctttgaagaaagagaaatatctactcaagtcctctgcccattaaaaaatttttttgctgagttacagaaattctttatctattttgaatattaacctcttattagaaatgatttggaaacattttcttccattccttgggttgtctttttactctgttgctactgttctttgatgcacaaaagttttgaacgctgatggcctaatccttctgtttttccttttgtcgtgagtgcttttgatgtcctatccaagaaatcattgccagatccagtgtcataaagatgtctccctatgttttctgctaagaattttacagttttagctcttatgtttaggtctttgatccatt[135 bp omitted]acatagtgagacctcgtctctataaaaaatttaaaaattagcctggcatggtggcatatgcctgtggtcccagctagttgggaggcagaagcaggaggatctcttgagcccaggaggccgaggctgcagtgagccatgattgtaccactgcactccagcctgggtgatagaacaagatcctgtctcaaaaaaaaaaaaaaaaaaaaaaaggcaggggagatccaatttcattcttttgaatgtggaaacccagttttcccagcatcatttattggaaagactgtatttaccccatcgaatgatcttggcacccttgcaggagtaaaatacggccatgagtcgcttcctgacagggatacgttctcagcaatgcaacctcaggcaatttcatcattgtgcgaatatcacagagtgatacttacagaaacctagacgctacaacctacgtagcacacctgggctgtatggtataacctattgctcccaggctacaaacctgtctagcatgtgactgcagtgaacagtgcaggcaattgtaacacagtggtaagtatttgtatctccaaacatggctaagcatagaaaaggtacaggaaaaatacagcattataatcttatgggatcacttgtatatgtggtctgctgttgacggaaatgttatgcatggcatgactgcattataagcaaataattaaagttaagtaataacacacaagaatctaatcttgccggaaagggcactgtaaaagtgaattgcaagagaagctcacaggaattagatgacttctgtgtctcccctttgacagtaatggatgcatccacgcacacggctcattcctgttttcagtgatgcgcttccttactattatttgcaaagggaatttgtctgttctgaccacacaactctacagagatacaaacatcacatgggcacctctgccttttctgtttactactaacgtagattgtcatgtaatttttgcccttccatgcctgttcttctgaggagaaattcccagtgttgagcagattttgaaagagatccagactgatgaaagattaaaaaccactgggctacagcagtatgtctttttttttttaatcttttaaaacttaaattcacaaatttgaggactccaattcagacgagcttcgttgtataaaccaggcagatctgtggtctttagaagaaagtgacagaatcagttcacttcctgggtggggactgagcacaggcagatggtcgcagcgggtcagaagccacaagctgcagagacagactcatgatagacagggcgacaggcataaccttcacaggggcgaagcgagacgcacacccgtctccagcagggagccacagtccacaggtggctactcctccctcccactgccctgtatttaggaattcaaacagcctgggaagggactgtgctgataattggctctgctttcaaagaacacttaggagataattaacccacagtccaccaagcccaggaattgaggatcgaggatcagaggaagcccaggagggagatgcctgccagaggcgagtaaagggacttagagagaagtgcagttttttctagcatccacccatccaacccaaggaagcccatctgatttaccacatctagccagtgaccttgatcagttccacagccaggcattaaggcgagtccccactaactttctcacctcagagaagcccgattccaattctagcccctccctggactctgtcagtaattcctagcaatgccttcactctaaaaaatccagctacaacaaaagattcagatgctgcagaatttattttgatttggaggtttcagctccaaatcaaagggctgatatcatggaaatagcttttttgacagctaaacagaaattattttccttgattagccatggcacattcgcccttcttaggtggacagcgtgttttgatacgaaggtgatgggttacaggtgctgggtttctccacatgggcagtttctccccaggagtctcactccttacatcatcatctagagcagtaattaatttcagaaaccactcctggctgccataagctgcacacccacttccagaactggcttaacccgccaggaagccacagtcctcaagggacagtcacccagagctgcatgttggtgagtcagagacgagaacaaagaggaagcaatgacccctgaacacagagcccttcccagcccagagtgctgctctaagcctaacccaggctggccagggcctgaaagacaaagaagaatgccacagagaagggccagggcactacagctttttttttttttttttttttttttgagacggagtttcacttttgttgcccaggctggacagcagtggcgtgatctcggctcactgcaacctccgcctcccgcgattctcctgcctcagcctcctgagtggctagtattacaggcatgtgccaccatgccccgctaattctgtatttttagtagagatggggtttctccctgttggtcagactggtctcgaactctcgacctcaggtgatccacccgcctcagcctcccaaagtgctgggattccaggcttgagtcaccatgccagcccagcatttttttttaaaggcacagttctcataggtataagaaggcaacgaaattcatcctgcaagatggatgtagccaaagactcttctttaattacaacaaactggagaagataacaaagtaaatattattcctctctctcttagagaaagcaaaaatatgttaaacaccattgaagagcctaaggggttttataaacctcaaaatcagcatcacattcatatacacatgagtactagtcacatatagccaagtaatgtgcgttagaccagggggtggcaagctttttttgtaaaatgtggaatagtaaatattttaggttttgcaggtcaagcgctcgctgtcaagatgactcaaccccatccattgtagggtgaaatgactgtggctgtgtgccaataaaactttatttatggttccagttttagtatatttgctgctgaagcaagcacaatttatggacactgaaatgtgaatttcagataattttgtatgtcctaaaatattcttcttttgatttttccaactacttaaaaatgtaggaaaaaagcattcttagttcatgggctgtacaaaaacaggcagtgagttggatttagcccatgggctagtttgcccactctgtattagactcagatgtttggactcatgtctttaaaacagagcctaaaataactccaaataaataaaagggcaggtatcaaatagcccatgtaatgacaaataaccacgctagaaatctgcgtccagcaggtcagggacactctgggggtgaagaccaacactcctgtcctgtctccatctcagtggcggaggatgtggggttttgggcagtctctgaaaagggagtgtgcacgggcaggagctggagcaatgtcacagggaagggggaggccagccctcatgtcctctggattctgaccctgtgctatggttggaatgttgtgtccccccaaaactcacatgttgaaacctaacccccaatatgacggcatctggaggtggggcctttgggagatgattaggtcatgagcatggcacccacaggaatgggattagggtccttgcaaaagaggccccagagacctcccctgccccttccatcacgtgaggacacagctagaaggcagaagccgaaccagaaagcaggccctccccagacactgaatctgccagtgccttgatcttggacttcccagcctccagagctgactgcaacacattcctgttgtttagaagccagccagtctctaatatttttgttgtagcatctgaatgaactgtcaccctcccttccctccaccaccctgtgtagctcttacatgtgctggggaccttcatgattcagggtctttgggcatttcacagaggaacagaaacttgtggattagagaaaattattatatgagataacatctttggattgtttgtataagataacatctttggattgtttgtttgtttgttttgagacaggttctcgcttttgtcactcaggctggagtacagtggcatgtacatcgctcactgcagcctcaacgtcccaggctcaagaggtcctcccacctcaccctctggagtagttgagaccagaggcccacaccaccacacctggctatttttgcattttgaatttttcatagagacagggtttcaccatgttgcccaggctggtcttgaactactgagctcaagtgatcttcctgcatcagcctcccaaagtgctgagattacaagcatgagccaccatgccagcccagataacacctttgaatacaaatttctcagccgggtgagg[131 bp omitted]aagaggctcagcatcatcagtcattacagaaacacaaataagaaccaccatgaaacaccacttcacacctacgaggctggttatactaaaaacagggaaaaataaaagtgttggtgaggatgtggagaaactggagccctcactccctgccggtgggactgtgaaaggacaatttggcagttaacttgcagttaccatacgactcagcaactccactcctaggtatattccctgaagaaatgaagctatatgtccaggcaaaagcttgtccacaaatattcatagcagcactattcgtaatagtcaaaaggtagaaacaacccaaatgcccatcaagggatgaatgcataaacagatgtggtccacccatggagtggaatactattcagccataaaaaagaatgaagctctgacacaggctacaatgtggatgaactgcaaaacaatattacccaaccttccagggcttaaatatatatttatatacacacaagtgaaagaagtcagtcacgaaaaaggtcacatattgtatgattctatttacaggaaatattcagaataggaaaacccacatagacaagaagcagacttggtgtttgccaggggctgggagtaggggactgtgatcgacttctaataggtatggagtttcttttcacggtgatggaaatgttctggaattagagagtgatgatggcttcacaacactgtgaaaatcctaaaatccaccaaatgaaaaccattttaaagtggttaaaatggtaaattttgggctgggtgtggtggcgcatgcctgtaaacccagcactttgggaggctgaggctggggattgcttgaatcccggagtttgagaccagcctgggcaacatagtgagaccttgtctctacaaaaaattagccaggcatggtggcgtgcacctatagtcccagcccagaaggtggaggctgcaataagccatgatcgcaccaccccactgcagcctgggcgacagagcaagaccctatcttcaaaaaaaaaaaaaaggtgaattgtatgtgaattttatcacaattgaaaaaagaagatgacgctgagtgctggcaaatgccagccacgaagagaaacaatgatatagagactaaaagcattcctgcattcctcacctcaggagaagtaaaatgcaatattctcataattatgagaaaattaggcacgagaacgtacaaagtacaattcgaacattttcagaaataaacttcagtaacaaacaacaatatctgttggacacgatccctaacagactgtttgtgaaaatctcgagtgatgggagagaagtaggtgtggggaaatctgtttcaggaactctgagtctaagccgcaaaacgtgtttacatgagacccatcaacagaataagccgagggactgaatgaggaatgaactgcgggaggtaggcattttacaatcaggaatctgaaatgagactatgtcccagtttgggagtcagagaattgtagactttctgggccaagccctcagtgaacattaaccctggagaataaaggagcagggagtttctagaagattctacatccgggagtggggggaggaaaactgtggaggttggtgtctcagaaatcttaaaggatgttaaaaaagaaaaccatgattcactgaatttaaaataggagaaaagctcagattaagaatgaataactttatcgaggattaggtcacaggaattctggttttaaattgtttacgtagagttaaagagaaagaatttgtaccataagaagaagccaactataacagcaaggaagacattcaagaacaggatctagtggctgcacaactgagctccctcctcgggctggagagagcaggggctcaagtccctaaacccgggccatggcagcagggggtcaatgacccaagaaagcagcttgggacggagggtggccccgcaggctgcatgctgggctgctggaaggaaggtcttccgctgagaaggcagaagaacgagtgctctgctggagaataaaggtagcagagtttacagccacgcgtccagagggaattcagaggggcggggcaggccgttgctaggctcgagtccgcgcaggagtcaagggcgacaagcatgagcttgtggctgcgcaaaccagcccagcagccaggcctccccaagaggcacacgcgagcatgggcgcagctcacggtgacagaatgaggctgagtcagtcacacgtggactgtaggataggcagagctaagctgacagggaacacgttccagaggaggggccgggggagggagaggctgccagggggtttgagcacctcctaagtggcccacagaacactgtgggtgagttcagtgtgcattctcctggagggtggggacacaagttttcacgaggctgtcaaagggtccgggacctgctactctgaaatgttaagaagctaaagagtttgtgttggcctgagaggcaaggagtgggacggggacttagggcaacggacacgcatgtggtaaaaaaaaggccctgtggtgtcggggaggcgaggaggtggccccggtcctgctggaggcggcgtagtttcaggagaggacaaaagtggaaagtcacctttatagtaggaatggagcgcagatgtaagtggcggcaagctaacgccaaggggaggaagtccatcaggctcagcaatttccctgccgcgagtgggcaaacatctcacacgtgtacacaaatatatttggacacgggtgcttactgcagcattggcggtaaagtggaaggtataaccaaaatgcctataaataaataactaaggccgggtgcggtggttcatgcctgcagtcctagcactttgagaggttgagtggggcagattgcctgagctcaggagttcgaggccagcctggccaacatggtgaaaccccgtctctactaaaatacaaaaaatttgccgggcgtggtggcacatgcctgtaatcccagctactctggaggctgaggcacgagaattgcttgaacccgggaggcagaggttgcagtgagccgggattgtgccactgcactccagcctgggcgacagagcaagactctgtctcaaaaaaataaaataaaatagaataaaaggctaagtaagtacttaggacaggagtggaatatcagaccattagtagaaagaatgaagcacaaacacagtagaaagtgataaggaaagatacaggctaaatattaggtaaaagagcaggtggcagaaaagtgagaaaaataagatctcttttttgaagaagaaaaaaaaaacacacaaaaaaaccctattagtccagccatgaaaaggaatgaagcaccaacacgtggtacaaggtggatgaaccttgagaacatcatgctaaaaacagccagtcacaaaaggctacttactatatgattccattttcatgaagtttccagaacaggcaaatccacaaagacagaaagtggcttagtggctgccaggggctggggaagggaggtggggagtgactgcttaatggggacagggtgtctttttggggtgatgactctggaattagatggtggtgatggttgcataaccttgtgaatatactgaaagccactaaattgtacacattaagagcctgaattctgcggcatgtgaattacatcccaatgcaaaaaacactaaagaattcgtatgtatgttttacaggcctgtgaaatatctgaaaccatccacaccaaacttttcttagtggtgggaggggcagaggagagaggaagaagcagccagaggctctttttttcttttttacaatttggatttttttttaatgatgaaaacgtaagacttttataatgtaaaagagaagcagtcagaattatggggactacacacaggatcccaaagtcctgaaatggtcactagggaattctggggacagatcactcaggtggcttggagggcaccacctgtgtttcaaagtccagtgatgatcactttagaaaatggacaacgctgaggtcaggtggacccacgctactcagactttgtcagtgaccttatgttttcacggctatgaagtatctgcacgccagtaagtagccaatatagtggtcaccttttaaaaggaagagttgacttaaaacttgtgcctgctttgactttaacacctttacctgtgcagtcggtatagaagccagggccacacgtggctgctgagcacctgaaatggggctggtccgaactaacatttctaagacttagcacacaaaaaagaatgtgaaatatctcgacaataatttttcatataggttatatattgaaatgaatattttcaatacagttcattggatgaaatgtattattaaattactttcacttgtctctttttactttttaaaatgcagctactaggccaggtgcagtggctcatgcctgtaatcctagccctttgggaggc[135 bp omitted]gtgaacccaggaggcagagcttgcagtgagccgagatcgcgccaccgcactccagcctgggcgacagagcaagactccatctcaaataaataaataaataaaaacaaataaataaaatgcggctactagaaaattgcaaatttcacacgtggcttgtgttatgtttctttattggccggtaatgatctagaagacacttagaataaatcatctcaggataagtttaagaattcacaaatattttaagagattctattttactagaaagtaagcaaaatgatttttagatgtagatgtgatctctatctagtaagaactcatgtaattttgacaaataattactctatttggtgtcccacaaatacagttagacatggcctctatcctcaagggttttgcatggatggggtgagaaagaaaaggagacatacacagataattccttacgtggcaaaaggtaacaggtgcagactccagatggaacagggtaccataaacaatggggcaggggagtctgggcagcatcccgtcctggaccctgctggaggtggggtagggaaaatcaggcagaggtgtaaacaaggggagggtgtgtggggcagggaaggggtcaagagaccaagctgggtggagctcggggaataaagggggaaataggatggaccacttggagaaagtctacgaatgcgagtcagagcccctggactgcaccacaggggcagaggtcaggaaactaccgcccaccacccaaatctggcccagccgctagcctgtttgtgtatggcccatgagctaagaatggcttttacattttgaagtggttagaaaaaaatcaaaatcaaaatattctgtgatgcatgaaaattacatgaaattcacatttcagcatccataaataaagtttgattggcacacggccaggcccaagctctcacatgttgtctacatctgctttcaagctccatcgggagagctgagtagttgagatagtgaccatctgggcctcaaaagctaaaacatttactatctagccctttatagagaatgtttgctgatccccacttccttggaatactaaaacatcctgtgggcttcctttgctcaaataaaataaaggcactgctcaaataaaataatggcacttgcgccaatctgcagaaatatttattgaataggttcctcgaatttaaaacattttccctaccaatatttcttaaacccttggtagatatttcctcttatttgctaatgaagagtagccaacaacaaaacaaaaactaatgtgataccctgcaggtttcacattattgggaagccctgtaccagtctgtctcacccaatcaacagcagttttaaagaatgtatgctcatagttgatactgcgcacactctcgtttttgttttttgttttgttttgttttgttttgttttgttttgagatggagtcttgctctgtctcccaggctggagtgcagtggcgcgatctcggctcactgcaagctccgccccccgggttcatgccattctcctgcctcagcctcccgagtagctgggactacaggcgcccaccac[138 bp omitted]cctggcctcgtttcttataatttaatcatgttgcattaataaaatatgagttcacatgatttaattcaacgcactcctggtattccatgatgttccaccatatcatgtggtctccccctcccagggtcccccaccatcttaaggccattgttgagggcagctggaagcaccagatttggaagaacacagaacaagaggaccagcaccatacccttcatctaagggaagaaatcggaagtttactttaacagtcctgcatgagagggtctgaactggaacagtataatcagaaacagaaagggaagaatcaatacaagaccagtttgggtggtgggacctataggaagtagtgagtagaaaagagggcagtgggttagtgggggtgaagcagagtggggagaggatgagatgacccctagccttcaacactgggcaacagaggagacagctccatctacagccttggactagaccctggggaggaagaacgagcggtccaggctactcgggtttctggcaagagcagggtgcccaggctgggacccacacatctctctttcacttgggccttgcctttcttcctagaccctgggcccaaccctttctgaagcaacaaagaggggaagcaactaaggagaaaggcaaattgcatggagtttagcggcaggaaagattcctcagctacctgcccaaaggactgagacatgcattaagatatctttacccttctgagggcgtgatcatcattccaattccaccgggcttttacaaggattagaagtaatacatgtaatacaccaggcacatagtatgtacccatgggtaacatcatggcaaccctttattattattaattattattattattttagagacaggtctcaccctctcacccaggctggagtgcagtggtgcaaacacggctcaagtaactcgtgggctcaagtaatccttccacctcagcctcctgagtagctgggactacaagtgtgcaccaccaggcccagctaattaattttttgtgtgtggagacagagtcttgttatgttgcccaggctggtcttgaattcctggcctcaagctatcctcctacctcagcctcccaaagtgttgggattacaggcatgagccactgtgccaggttccctttatttttaaaacataaccttggtgatctaacaggcactacttttaaagtctggctactccttactgagggctgctttttttgcccatttgcttgattctgtggccaacgtaacactctctgctgttcttgaaaaaccctctttcttcttttcttatacaagaatcaaaaatgttatcacacagcattgaacattcttatatagatcagagaaggtgaatgactcgataaatgacgtcatacatgattttatctatgagctttgtaaccagacaactaaatgtataatttattccagagtgtctatttggaaacaataaaagaactttgctacccctgaagtttatcccagcctcagtggtttatattttgacttgcattaaaaacgacctctcctcctgatgagaactgttactggtctaactagaaatgtggggctacattgcgggaacttgagaaatgggggctctccctgcaccgagacagcgcagtgggtgcttggctgataataacacctgtaaagaggccgcaagatagagacttcagtgagatgcgttttcgtccaagttcgtcagagccacctgggcaatgatcttgagtcagtgtctctttggtggttttagcacattccaggaccaccaatactaccatttactatttttctttaacactcagctctcaagttttgaagtctgttcttcgttaaacgtgagaggtcaggagtgttatagaggggttaaagataccttaacacccacgagagactttctcctcagcctactgggaaggcctaaaaaagaactggaaaaaaaaaagaggattctgctttggcagatccagtggtagcagatccacgtgttgggaaatgcttttgagctggggaacaaagctggggaaatagatctttaagaaagggagccaaggttagaaatatttgcctacaaagtgagtaaattttatgtaactctgttaattctctgtaactgcttcctctgccactgctcgtggcccagggctgactttttggggtgaccccaaatgtatgcagctttcaaatctttcacaaactgcttgaaccacaaaaaaaaaaaaaaaaaaaaaaaaaaaagctaagggttaaaatacaacttgccctataaccttgctttccctcagagcaaaaaggagaattcattggttcaacaaatgctgagtgccacatttcgttgctgaaacaattctaatagacataacagctctatatttgttccaaattgactttttaacagagtgaaatctttgaaaagttccaaagcaaaacaagagacaaatcaagccactgcaatgggctgggacatagaattcgggatttcatattctccactgtgtactcagctcctagcaatgagactcagcagcagctctgttataaaacccctccccgctccccgaactttctggaaaaagaacttcatttgcaattttggctgggtaaaaagggaaattaattaacagtaggggtctttgattaaaatttcttttgaaatttggtaaaggaaaagtacatattgaaagagctggaatgttaattgagatcaaatcgaaaacatggagtttgaaggttattggatctcaggcacgggctgcgtgatttttttttttttaagaactgaaggtttaccatcttgatgtaggccttgccgtcctgaagagcactcgggctcatgtgtttcattcactcacatgttaaatatgaagccctatgtacaacatagcctgtgggaactgtggcaggggtagctgtctccatcctccagaaccttgtcacaatcaagaataggaaatgagacgcacaaatcactaccacctgtcgaagtggccttgcagtgctaaatctaagtgctgaggcaatttgcctgcagtccttgccacttcttgttgattagtccagcagcccccagctgggaggcaattctgttcaccctcactcccacctcaggacatctggcaatgtctggaaacagttggttgtcaccacttggggaaaggggagtgtgcttttggcaggtagaggcctgggaggctgctccacatcctacagtgcacagaacagtctccccaaccaagaataatctggccccaaatgtcaatagtgccagggtagagactcagctctagtttatattttccaacttagctcctcaatgaaaatctcaagtttccatggcaagaggggattaaagaagggtcttgagggaagagtaggattttcttcagtagaaatgacattccagagaagggataagaaagtacaagacccgtttaaagtatggcaagctcatttggagtagtgaaagggaggcaacgaaaagggagatggggctggactgaaggaagccttgaatgtgtggttacaacaaaggggaggggacagtttgtccgtttggctaacaaaagtagtaagaaagtgcccttccgttcctcctgacatagctcaaagagacatgacaaggcggttgggagaagaggaagagatcagtaagaatccagagacgacagagcccaaggtctgtgcaaagagccgcagggagacaatacaggaagtgattaggcaggaggctttggcggcgaccggaaggctggagaattattgcctctgtaacaggagaggagggctacttccagtaagaaggaccaagactccagaggccactggcactagaataagaagagaagtaggctcatgcaggcccacgtaaatcggaggaaggtggaagtttcctgaccggaagtctaggtgggaggcgccatgttgcggcccagccgctgctactgactccaccatccggcagttcgtgaaattaaataactgcaaattgatgagtcttttcttttgcatgctgagtctctccaatgagcacactcatcagtgtgaaccaaggctggcaattaattgaattatattgatttaattgaattaattaattgaattatattgatttaattgaattaattaattgaattaattaatcatatccatttccagaagtaatttttactcacccgcgtctgtcattttaaaggtctgcagtaaaaataccaggatttacacaaaagatttgctcctgagacatatcctgcttttaacttaggctctgaatatcagttgccaatggtttctaacaattttaaatttgtctagtgccttctcccctctcaactgtccacatgacgatatattaatacacgtaaatgcttaactaattataagctcctcagatgtttgatatttcaggcccacaaatattttctaaagaaatggatggagaccccagagagctcctcactgaagtccctagtagggtgaattcttcaagaaaacgaataattccttttaaaatcagaagcacatcttttagtctgttttcagtgggtctggaattccaaatatattttttctcaaggcaggctacatctgtctgtatgtattctgagaaggacaggagaggtgggaaaaaggccttcgtgttattttctttgggtttccactggcctgggtggagcccgcatacatttttgtgggctggtaatttttttggaaactgcttctaaggcctttccccacagatcaccttttggacagaaatgtatccttggaaacatggcacagtttctaaaagataaacagtttgcatttttaaaaaagtataattaagtgctgttgcagctttaggaatggacttctatatcattggtataatttcaacagttttccaggagacaggcgttcatgagtcaagccttctgcctttctgtggggacccaatcctttttcacatgggacttgggcaagtctaatctttctggttgccattggatctcactcttcatggtgctcagttcttgaagttatttcctcctttgccttttgagcctctgtccaggttctccctctacctaagagtccctttgagatctctgcttagcatggttcacaatagctgtaaggtggaaaccacccaagtgttcatccatggatgaatggggaaacacaatgtggcatatccatgcaatggaatattctttagccttaaaaaggaaggaaattctgatgcatgctacagcatggataagccttgaagacattgtgctaagtgaaataatccagtcacggaaacacaaatactctatgattccacttatatagtgtatagtcatcacattcacggggacatgaaaacatgggccgcccagtcctgaaaacatggccacacccctctcccccatctgctgcctgcagaacactattctcaagatgcagttcagatccacatcctcttttcagacctttcctcagctccagggacagctggcctccccactttgtctgccctctgtgccctgtagaaacatctagcaaagcctatttgatactgactcctcttccttgttggtctttggtctttgtaactggataggatagcactttactcaaaataggcaatgaataaatgaatgaaggatgaatgaatgaagattgtatgaatgaatgatgaacaaatgtcaggagtctgaaaagcaggtcttccggtaaatgactggacacctttgatctgacaggtaccggctgatgtgaactctaccaatgatccagtttatacttcgaatagcatccaaactttgcccatggcctccaaggccctgcaggttgcccctgcctcttctgcctctccttgctttgctcgccaggcatcagccacacaactgcaggacctttgtacctgctgcccccttcctggaaggctcttccttctgaaccccacagcgctggttccctctcctcatttcagtctcagctcaactgtcacctccttaaaaactgctggacgccaggagcccagtccgcatcacacggccttgcttttttgtctctactgttcaatttttcagccaagttcaaatacaagaagcctcttatggccaggcacagtggctcacatctataatctcagctacttgagaggctgaggcaggaggattgcttgagcccaggagtttgaggctgcactccagcctggacaagagagcgagacttcatctcgttttttattatgaattacccatcccccagtctcagacatatacacaaacacatgcacacacgtccaaaaaaactgcagagatcttagtagaaataggcttaccatatatagcacatctgggcttcattatgtaataaatgacaaataatcactatattggaccattacatgtaagttctacatatttttaatggcttttcagctttttctccactttgaaacatggactgtagcaggtgtaaatggactgacagcatttaaaatctatctgctttatgtatcatctacaggcagtggcaagtcaactgtactttttagaaagtcatggaattcacaaacattaaaaataagaataaggaattgccagggcatacaacagggttttcaaacatgcaagacctatgtatcataaaacaggaatgcactttcaggaaaaaacaactgaggtgcagcaaggccaggccgtctgctcctaagggcccaactcaagtcctggcacgaagaccaggccagtccccggctccaagtggctcatttccagactctgactgtgttggcatccaagagccagtgataacagagaagggaaaccagtcttaaaatgttctcatctgtagagctggccactccccaaaactcatcataaatgtgatgtttggggagtcatttcagagggacccatgccacaaccaagatgtaggactccaacaacttttcgtgctgtttttgttcttacgaagcacttatgtttgcagagggacatattagtacccatgagtttctaggttaatttaagggaatttcctaccctaaaacagacagcatgaggccgaccactcagtcaagcaagatgtatgtactaaacgcctccttagcatttggtcctggtcaggaaaccacagtaaaaaactgatcatcccaggccacttactacttatttgcttcatcctaataataataataataacaacagttacttttttctgagcacctattagatgccagcccctgtgctaaatagcttatagaaattatttctaatatagcaaccacacgagctattattatcgatttcacagatgtcaaaccttgccccagagccactaagctaataaacggtggcaccacaatttaactccttctctgctgtgccccaaagccctggtctgcaacacccagcactatgacctgcaacttttcctttcctctttcccctgccccattcatccagattcatccaatttgggctctactgactcagagatggcaatatgaacttaaggtacc[216 bp omitted]gaggcaggagaatggcctgaacctgggaggtggagcttgcagtgagctgagatggtgccactgcactccagcctgggcaacagagtgagactccatctcaaaaaaaaaaaaaaaatttttaagggcagggtgtcgctatgttgcccaggctggtctcaaactcctgggttcaagcgatcctcctgccctagcctcccaggtagctgagattgcaggtgtgagccaccacacccaatgcagctctcaactcttcatttctacatatgctttccccataagtgtcaaggaaaccatttgtttattcatttcacaaatatttctcaattgcctactcagca[132 bp omitted]aaaccctgtctctactaaaaatacaacaattagctgagcgttgtggcacgtgcctgtaatcccagctactcaggaggctgaggcagaaaaattgcttgaacctgggtgtcagaggttgcagtgagccgagattgcaccactacactccagcctggtgacagagtgagactccgtctcacaaaaaaaaaaaaaaaagaagttaataaaacagaagttcctgcccttactgagctgacattctaacaagaggacagtgataatacaataaatacgtataacttatggtgtgttatataggaataaatgctaaggagacagagaaagcagggaaggaggctgagagcacccattctcaagtgggtggcctggtgacatctgagaaaaggcctgaagaaagtcggagagccagccctccaaatacctgggcaaagagctttccaggcagagctggaatgagcttccagaggccagcagggtggaagtgcagtgagggaaggcatctagcttggcgatgaggtcaaagaggtattaggcttggcggggagtggagttaggggtgactttggcttttgctgcagatgagatgggagccatcggagggtttcgagctgaggggtatgaagtagaacttaacatgacgccgcctctcccagggttaacaggccccgtctggctgctgggctgagagactgccgagcaccagtggtggaatcatccgggctagatgctggtggctgggaccagaggggctggcagtggaggtggcgaggcatggtcaggttctggggaactactgaaggtggagtcaacaggatttgctgatggcttgggagagaggagtcaaggacagtcctgaggtttggcctgagtaatgggaagaagtgagttgatatgtaccaacgagtttggggggtgctttgggaggagtagatctggggggactatgacaggctcagcttggccaccttaagtttaaggtgcctgtcagaatccacctggatgtacccagcaggcagctggatagatgttttctgcagagaagagcttagaatcctaagccagtccagagcttcccaggctccagttccctataggcctgttagggcctctctctggaccttttgccactcctccttcacctacccttatccctttcgcccacttcattctgggtcttcccctatattttttttcctgggagaatccttttgctgatcttagagtttccaagaagcaagtaggtggttttcagttttttctctaattcccagtgtatattccatcggcctgcccatccatccatccatccatccatccatccatccatccaacaaaataagacctttcactacaccaggcatatgtctacatgagagaacatgagaacatgaccagcagaggagctaattgccatttaaattctagagacggagtcaaaacatctttttaaaaaatacataagcccacaaccccttacaacaatactgaaatccaggaaactctgaaaactggcaatttttttgtaaatttggcatggactcacttggtgacaaaagctggcctgaattgacatgaagttacttatggtccttctcttccccacttcgggtgaatattcatatagttcagttcagaaatacggctgtgtttagtgggaatgccctggacccatagtttcagagacaggcccacagactcgcattctcctcccctgcagtttagtgagtgtcctgacaagcaagatgagaacttcccttggtttttcaaaagtttcctattttacaagtaagtgggtacctatgggggtatactgtttaaatgtttgtaaatatttaaatatatttgttttatatttaacatatatttatatttaaattttattatatttaaatatataagtatatattatatatacatgttttaatatttcaatatatattttaaaaatatttaaatatttaataaatagatgtcaactttagaaacaaatatatattataagatgtggttccttctggccccagcattttatgagcaaaacaatcactagctactataaaaatccacaggtgccggccgggcgcggtggctcacgcctataatcccagcactttgggaggccaaggtgggcggatcacatggtcaggagatcgagaccatcctggctaacacagtgaaaccccgtctctactaaaaaatacgaaaaattagccgggcgtggtggcaggcgcctgtagtcccagctattcgggaggctgaggcaggagaatggtgtaaacctcgggggtggagcttgcagtgagccgagatggtgccactgcactccagcctgggagacagagcaagactctgtctcaaacaaacaaacaaacaaacaaaaatccacaggtgcaggggccgggtttggtggcttacgcctgtaatcccagcactttgggaggccaaggcggttggatcatttgaggtcaagagtttgagactagcctggccaacatagtgaaaccccatccctactaaaaatacaaaaattagccgggtgtgggggtgcatgcctgtaatcccagctattcaggaggctgagacaggtgaatcccttgagcctgggaggtgcatgttaagg[132 bp omitted]agccaatttaatatttttattaattataatgctaatgtaaaactaaacaattagatctaaggaataagacccagataaacaattccccagcacctgcatttctggtggacagaaccatccttagcagtacttcaatgataaacaatgttaaaagatgagtatttacatttaaatatacatcacatacacattatattatattgttgtatttaaatatacatcacacatacattaaggtaatgcgtgcccttcacgcagaaagcaaagatcaagtgatttcaaagaacttgtcctgttattgaggtaataactgtctctctcttctcagattcagtggtttataagaaagaacttaaaaaactaaaatatttcagtattgcttttcctgcaggagcaaactatttcagaactcattcccaacccaagtccgttgaactgtcacagaatcacagaacagtgatctttcccatcatacattataagttgccttccgtaccacgcctgttgatgaagaagccctagtaattcaagaacttaaattcttttcctagggaggttaccataaactcttacttctctggtcagagtaggtgagttgtcgtttctaaggttattttagagtcagttcaagtctttaaactagagcaggagaaagcacagatgcccccctcctccttatccagaaggacgggaggtaaggatctttccataagcaaacaatgtttcagggcacgatgtaaaaagataaaatacatgtcaacaatatgtacaggcaaaaatttttttaaaaagtctttgttgttttgtgtcattattattattactgttactttgttggggaactcttagttgaaacagagaatgaagcttgtacaaggtttgatacagagatgaagctgactgagagggaaaagaactcatcgaagcctgcgctggtcatttatgatacaaagcaggaaaataattgcagggaggcacaatgctaacaacaccccaaagtaggaatgaagcctgggggggcgggggtaaggcagccagccctgggtcccgagctccatcttgccctctcccctccccattcttgccgcacaaccaggaggttaaaataggaagatgaaccgcgccggcagccgccagaatggcccgggcgcttggggccctcgggggcccttgaaatagccactaggatcgggaaatccaactttcccagcggtgcagcgaggaaaaccaaaaggaacggagccggaggctggtggcgagggagcgcggaggcttctcggagggaggaaaaagaaagaaatgagcatttggggtgtgagtgagtgtgtgtgtgtgagtgtgtgtgtgcgcccgcgagcgcgctggtgggcggtgggggcagggggtggagtttaaatccacaaacacacacacgcactcgcactacctcggagaaaatgcctggagcagtttaggttctttaacaaaataaataaattgaaaaaaaaaaaaagtttcactcgcgttggtgaaacttttctcccttccagatcagtcctaagaggagagctgcggacgtgcggaggggcatcttgggggcacgtggaaagactggcggacgcacgaacccctatactcaggaatatggggtcacagggagaaggggagggggtgtccgaggcgacctgaacgcgaggatttggggcaaaaaggtgagaaacagttcccggggaagctcgctcggggagtttgggatgaaaaggtgagaagggcaagaggggttctccccagggcagacgcaccagcttttagttaaggaatgagaaaaaggttccaggggtgcccccaaattcagtatgtctgggagtccattaaaaagggggtccccgggacaagtcagatctaggaatttggggtaaaaatgagaagggagtcttcgaggtccccccgatgcaagaagtttgcgactaagagtgacagaagggctctggggtcaccccaatttcggaggtttggggagtaaagtaagaagagggccccaggtggccccaattcagggagtttgagggtatgagtaaaagaggggtccccgggtgtccccatctcagagatctggggagtaaaagtgaggagagggtccccaagcgcccccaattcagagaattcgagggtttgagtaaaagaagggtccctgggtgcccccaactcagagatctggggagtaaacgtgagaagagggtcccctggcgcccccaattcagaaaattcgagggtatgagtaaaagaggggtccttgggtgcccccaactcagagatctagggggttaaggtgagaagagggtccccaagcgcccccaattcagggagtttgaggagtttgagagacgttcccggggcgcccccaactcagcgagtttgaaggtaagcgtgagaaaggggtccccggacgccccaacctcaggaagttttgtaaaaagtgaggcgacggcaccgcacctcccccgcgttcagtcaataaggaaagtggggacgtcgccagggtccccccaaactccgccgcgcgcgcggacggggtggcggaggcgggtcccgcgggcgcaccacccggacgtttggggtgagcggcggggacgtgctgcccgccccccggcccccgaacggggtccccgccgccccccacactccccggccgggctgggcccggggcggtcgcatcggtcacctggagttcgggccgggagttcgggcagcggctcccgcggcggcggcagcggctgctgcgtgttggtccccgttggtaagtaacagtctccacggctacagtctctatggcggcggcggtggcggcggcggccgctcctcctccggctcccgccgccagccagcctcgcgcagcccgcccgcccgacggggcggggcgttgttaccggcaacggttaccaggctccgcgccccaccttcctaacggcccgcccacgctcgcctccaacgggcccccaagagggcggggcgcgagaccctacggcgttccattggctgtctgcagagtctgtcggaaggaggaggcgttcccccttgaaaaagagtgcgagactcggccaatggccgcgaagaggggcgggtcttggcgggaggcgcgcgcggctcagagggttggcgaaccggtcgcgcgcgcggcgccgtgggttggtggcgcgttttgggaaagtccagttttaggggacccaagggactccgtttaccccacaggaggagtgtgggacatgtgggaacagtctgatcaggggtcagcaaactctcgctcgccgcctgtttttcacggacccccagctgaaaat[224 bp omitted]gaggcag[136 bp omitted]aggagcttttgtggggtgtgaacctgataggagactctcttttattgtattgggcccagtattttgaactagtttaaagattggcaaactgcggcctgcgggtcaaattctgcctgcttgggtttgtaaataaagctttattggaacatagccacgcccatttccttgaacagcttggaaggctgctttgacactacaggggcggagtggagtagttgcgcaaagacggcatgtcccacgcgaagcctaagatatttactatacggtcctttacagaaaatgtttgccaaactcaccagccctcctctcaagctggtagattcagctacgagtaggacagaaacagacagatcctcatagaacttttattctagtgagggaacattgacagcaaacagaataaagaggtaaacatatagttattcgagacaaggggctggaagaataggagaaaacaacttgtactgagaaaaggcaggagattaggcttcagccccactcattcattcaacaagaaatcatattagtgagcactgattaaattgctatgtgcctgaaagtgatctaagcattttttaaatatgcaaactcattaaatcttacaatcgcatctttagaaagatgctaggcattatccccgtttttatttgttttgttttttctttttttttttttgagacagagtctctctctgtcacccagactggagtgcagtggtgcgatctggctcgctcactgcaacctctgtctcccgggttcaagtgattctcctgcctc[134 bp omitted]tggactctcaaagtgctaggattacaggcatgagccaccatgcccggcctttccccatttttcagatcaggaagctgaggcccagaaagaatgagtgaatttgcccagtgtcaaacagcttgtgagggatcggaaccctagtagtctagtgccaaagtccatgctcttgatcactagatgggtggttttcaaacatttttgaccacagcatacagcaggaaatacattttacctaggggctcagtccacacaaacatatctataactaaaacaaatgatactgtaactaaagtaccgtgaaatgatactttaacgcactctgatatttcctgttctgtttcattttaattaaaatgttgacggtgatttgctaaattgatttcatcatcttctaatttttttttttttcttgagacagagtctctgtcgcccaggctggagtgcagtggcatgatctcggctcactgcaacctccgcctcccgagttcaagtgattctcctgtttc[133 bp omitted]tcagcctcccaaagtcctgggattacaggcaggagccactgcgcctggccatgtgacagattcttaagctcaagtggtctacagtaatcagtccctttcattcaattattaatttagtcaaaaatatttattgaggtccaagtgcagtgactcagcaggaggatcgtctgaggccaggggttcaagaccagcctgggcaacatagtgagaccttatctctataaaaataaaataaattagccaggcgcagtggtgcacacctatagtcccagctgctcaggaggctgaggtgggaggatcgcttgagcccaggagttctaggctgtggtgagctatgactgtgcctctgaactccagcttggtagacagagcaagaacctgtctctaatatatatatatatacatttatatatatacacacacatatatacacacacatatatgtgtgtatatatatagtatatgatgatagatagataggtagatagatagatagatagatagatagatagatagcgcctactatttgctaggtgctagggacacaggtgtaaataaaatagataaaattcccatggccataggaaaagtgatacagtagtggcttggtgggagaagtgggtgggtggggcttaccttagatagagcagccagagatgatctccctgggatatccaacaatcctgcttggcccaagactaaggggtttcccaggatatgggaatttcagtgctaaaaccgggaaatccccaaagcgggaagagttggtcaccctgggtctctctaaggagctgacatttgaggcaacgttggagtaacgaggaacaaaggaaaatagtttggaattcgaaatccctggggtgaaagctgatgtggaagaaacagaaagcaggtccttgggcacagctggagccaatgaaaggggaagagcagtgagtgggtggggtgagtgagtcaggggatgatatgatggccatcattttattggaggccgtagggaagaagtcacgatcagactgggaaaccaatggagggtgtcttttgttgttgttgttgttgtttgtttttgagctggagtcttgctgtatcgcccaggcccacgctggagtgcagtggtgcgatctcaagttgtagcctcggggagtaaggtgaccgcctgtcctggaactgctggtcaacccgtttagctaagctagacctcttcccgctcccagccctggccagaggcggaaactgtggccccagttatctcaaaagacaagcacagagtagcaaaagacaagccaacaggtggcaaattcttagagtcctgcttttgtgcggcacatttttgtaaattaaggtgacatttacataccataaaatgagccattttaaaaggaaacagttcagtggcatttagtacattcactatgttgtacaaccaccacctatatctaattccaaagcattttcttttttaatttgtttttttttttatgatggagtcgcctgtcacccaggctggagtgcagtggcacgatctcacctcactacaaccttcgcctcctggattcaagcgattctcttgcctcagcctcccgagtagctgggattacaggtgcacgccaccatgcccagctaatttttgtatttttagtagacatggggtttcaccatgttggtcaggctggtctcaaactcttgacttcaagtgatccggcccccttggcctcccaaagtgctgggattacaggcgtaagccaccttgcccggcccccatggagggttttaagcaggggtgtgtgcggggacaggtggggtggggagtgggtggaatgtcacccgatctgtgattttattttattttgtcaattaattatttttttaagagactcttgccgggcgcggtggctcacgcctgtcatcccagcactttgggaggcc[134 bp omitted]gaggcaggagaatggcgtgaacccgggaggcggagcttgcagtgagccgagatcggtgccactgcactccagcctgggcgacaaagtgagactccgtctcaaaaaaaaaaaagactcttactctatcgcccagggtggagtgaagtgacacgatcacagctcactgcaccctcagactcttgggttcaagggattctcccacctcagccacccaagtagctaggactataggcatgtgccaccaaggctggctaaatacaagaattttttttttttttgtagagacagggtcttgatctcctgatgtcaagtgatcctccttccttggcatcccagagtactggggctacagggatgagccaccatgcatagcctaaactataattttaaaagctcagttgaggccaggcccagtggctcatgcctgtaatcccagcactttgggaggcctagaggggtggattacttgaggtcagcctggccaacatggtgaaacccggtctctattaaaaacccaaaaatgagctgggtatgatggcaggcacctgtagtcccagctactctggagactgaggcaggagagtagcttgaatctgggaggtagaggttgcagtgagccaagatcgcaccactgcaccccagactgggcaacagagagagacaccatctcaaaaaacagaaatgaaaataaaaataaaaatgaaagctcagttgagccacctcatggggaatagattgtaggagacaaaagggacagagagagatcctaggagtctgtcccagttctcctgggtgggaaagtatggtggcttggtttagggacctggtagtggaggcggacatgagtgggtggactgagggtacatttggaagaacactctagtggactagatgtggggagtgaaggataacgttttagggtgtgacaggaggtgccttgtagctggtttgtacactccgttctgctagaatgcttgtctttgaaatgtcagttagtcccaaagtggtggatataataggaaacaatttgagcacaatgtggattttgccttccttatgcacaattttgtctgcaagaaacactaggtaaatagaaaactgcacctgtctggaccaaatcgtgtaggactgcacaaaatatgcataagcacacatctgaaatatctaccagccacctcagcttcctgtgaattatgagccacatttatctatgcctagcattacaactttccatctgattacagatgacttttctaccttttcacaataactcacaagctgcaatccttcaatagcaacttcctcaagcaaacttcagccctttttcatggcaatgtggcatatttactatagtatttatatatttcttaactaaccaaaatgtgtaaaactcttcaatctcaaagaagaaatcatgagggaaattagaaaatacattaagggccaggcacagtggctcacacctgtaatcccagcaattggggaggctgaggcaggtggatcacctgaggtcaggagtttgagaccaacctggccaacacagtgagatctcatctctacaaaaattaattttaaaaacttagcagggcgtggtggcatgtgcctgtggtcccagctacttggggggctgaggcaggaggatcgcttgaggccaggagatggaggctgcagtgagctatgatcacgccactgtactccagcctgggtgacagagagagaccctgtctcttaataagaaaagaaaagagaaattgctgaagtgccacattcctgttgacataggacacccagggcagacagcgaggagacagatgaagcttaattcttgaatgaatggaggtaaggctgatattttctcctagtggactctggtccagttcattccagagacaaagctttgcctccttaaagtagccacttgaaccatgttggaggaccttgttgggcacagcttggagaggaaatagcagagctgaagtctgcagcagaagaagccacaggagtggataaccaggcagtggtagagggaaaggggtgtgcacaaggcaacacctgactcccttgctcctcttacctaaggcccaagggcaagtgacaccaaggaggaatcattttcaggatggccaactcatcctggtttccttgggactttcccacttctaaaactcaaagttgcagttccccaaaatgtaaaaagtggaattcccatgggatccagcaattccactcctaggtgtctgcccacaggaagtgaaaacttaggtcttcacaaaaacttctacatgaatattcctagcagcattagctcataaagccagaaaatgcacacaactccagtgtccatccatggaggaacaaataaacaaaatgtgatctaggccgggcgcagtggctcacgactgtaattccagcactttgggaggccaaagtgggaggatcacttgaggccaggagcttgagaccagcctgggcaacaaagtgagacctccatttctaaaaaaaaatttaaaatattagccaggcatggttgcacacatctgtagtcccagctacttgggaggctgaggcaggaggactgagctcatgaatatgaggctacagtgagctgtgatttcactactgtattctagcctgggcaacagaggctctgtcaatgaaggaaaaaaaaagaaaggaaggaaggaaggaaggaagaggaaagaaaggaagggagagagaaaaagagagagagaaagagaaagggggaagaagggaagagagggggaaaggaagggaaggagggagggaggaggaagggaagaaagaaaagaaaaaggaaggaaggaaggaaggaaagaaagaaagaacaaaagaaagaaaaaggaaattacctaggtgtattcccaaatttttggctgtgaaatgaattctttgcctcacatcaccccataataaagctgtggtaaagcttcagttcccatggaaggctagtgaggagggttaggtgtctagagacctgggtttggagttaaacaggtgaaaatggagctgttttgaaggcaaggggcacaacagagtgtttgcatgcccagaatcaccgatttgaaaccccagcatcaaatgattccaaggatgggtctctgtcacctcaaatagtctgtgagtaaaaaacataatttaagatgaggcattgagaaaaagtggatgacaaaaacctggaaacaccctaaacagcctacaataaagcactgattacccaaagcagcattcagctaaacaatgaaatattatgcagcaatgaaaaagaataagatgcaactatccgagcagtataggagaatggctacaatctacttattaaacaaaaaaagtaaatgcagtacagtgttcacagtgcactcctatttgtgtttttaaagaaagatatttatttaaaaagagtaccctttaaagtagtaccttttaaagtagtaacctttaaagtgtatatctaccagccaggcatggtggttcatgcctgtaatcccagcactttgggaggccaaggcaggtggatcacttcaggccaggagtttgaaatcagcctggccaacatggggaaaccctgtctctactaaaaaatacaaaaattaccccagaaatggtggtgcatgcctgtactccagctacttgggaggctgaggcaggaggattgcttgaacctgggaggtggaggttgcagtgagccaagatggcgtcactgcactccaacctgggtgacgagcaagaccttgcctcaaaaaaataaataaaaataaattaaaaataaaaataaaaataaaataaagtatatgtctacctacagtgtgtgtgtgtgtgtgtgtgtgtgtgtgtgtgtatgtcttatagtagatatctatctatatctgttaccctttaaagtcaatatacaaacatttattgtttactatgtgcttaatagtttctccatcattttgccataagaactcattttatcttcatgataatttttgcattattagtcccatttacatataagggaactgaatgtattcactatctactgctgtgtaacaaattaccccaaagatcagtagcttaaaacaagcattcatgatctcacatagtttttgtgggtcaggaatctgggtgcagtttagctgagtggttctggctccatgtctctcaggagattgtggccaaactgtcagctggggctgcaggctcatctgaaggctcaactgggaaaattattcttctttccttccttccttccttccttccttacttcctccctcccttcctcccttcccttcctttccctttctttcctccctcccttcctccctccctccttccctcccttctttccttccttccctccctcccttctttccctccctccctcctttccctccctccctccttccctccattccttcttccttccttccttcctccctccctccctctcctctcctctccattcctctcctctcttctcctctcctctcctcttcccttctttctcttttgagacagggtcttgctctgtctcccaggctgctgtgcagcggtgtgaccatggctcactgcagccttgacctcccaggctcaagtgatcctcccacctaagcctcctgagtagctgggaccacaagggcatgccaccgtgccctgcaatttttttcatgttttgtagagatggggtctccttatgttgcccaggctggtctcaaatttctgggctcaagtaatcctcccacctcagcctttgaaagtattgggattatgagtatgaatcaccacacctggcctattcactctttcttccttccttacctttctctgtccccttctccctccttccttccacccctttctctctctctttctttctcttctttcttctttcttctttcttttttctctttcttctttttctttctttcttctttctctctcccctttttcttctttctttctctttttctttcttgtaagaacacttaacatgagatgtagcctcttacattttgatgtgcacagcacggtattattaactctaggcataatattgtgctgcatatcttagaacttattcctctcatatagctgaaacttcatacctgttgaacagcaactccctatgggagaggattcacttctaagctcactcacatggttgccagcaggcttgagtgccagctcaagagctattggctagagatttcatttccttaccatgtaagcttttcaacaacatgcttgagtgtccttgtgacatggcagctaggacctggcagctggcttcccctaggcactcaagacagaaaccacagtctttttatagcccaatatcaggagtgacatcc[222 bp omitted]gagccacagaattgcttgaacccaggaggcggaggttgcagtgagccaagatcatgccactgcactccaggctgggtgacagagtgagactccatctcaaaaaaaaaaaaaagaagtaagtcagtgagactggatgcagtggctcacgcctgtaatcccaacactttgggaggccgaggtgggcggatcacttgaggtcaggacttctagactagcctgaccagtctctactaaaaatacaaaaattagctaggtgtggtggcgcacgcctgtaatcccagctacttgggaggctgaggcaggagaatggcttgaacctgggaggcggagattgcggtgagctgagattgtcacgccactgcattccagcctgggcgacagagcaagactccatcccacattcaagggaaggattagataagggtgtgaacaggagacaatgggggccctgggggcccatgtaggggctgccccaccacactggggtacagaaggggtcagtcacttgtccacacttacagagctggctagcaaattgcaaagttgggattcgagcccaagcagcacgtctctaaaatctgagttcttcacctccaccctgtaccatgcctcctctgcgcccttttgcagcatgcttgtatatgcagatattatttctggaaagataaaaaaatacactacggatatacataacagtagaagggaggcttaactttcatcgaagaacctttcatgttgttgagtctgtctgcattgtttttatgtgtgtttaccaagcacagatattatttttcaatcttttttttgccatagaactcgaacggcatgataaaataaaaagatatttttctgctaaaatacaaaataaaatcaaacaaaattatttatttatttattcatttattttaaagatgaggtctggctctgtcacccaggctggagtacagtggtatggtcacagctcactgcagcctcaaactcctgggttcaagggatcctcccacctcagcctccagagtagctgggactacaggcacctgccaccaccaaacccagctaatttaaaaaaaaaaaaattttaagagacgaggtattgccatcctgcccaggctggtctcaaactcctgcgctcaagttatcctctggcctcagcctcccaaagttctgagattacaatcatgagccacccttccctgcctcaaacaaaaacatttagacagcacgcttacaaggaaagaattagtaaaaccacagggccagtgaaaacgagtttgggtatgagaacggtacaaaaactgcctccttcctgggacatttccaggtctgcttgagagaatttacccttggtgattgttaaaactatttttttttctcccagacgagcttctccctaattgattgtttttatttaactgatgactgttaattaaccagctctattagaactttacaggccattcacgcactgatgcgtagttttaacagcctcttacttggtacaaacctgagtctgagcatctgatcctttcaagagtagcataaaaggacaatttccataatgatggggcttctgaatagcggattttgtgtaaaaagcacctgagtaccgcagagatcttttatttgtctcgcggctttctggccatccgctgccacatttctctggaacacggaatcatttccatagcaaatacctgtgaccccgaacagccatcgaaggggcaagctgaatacacaccaagcacatttaaaagaaaaaataattttttttttcagccaaaggtattagccacttctaggcaaccgggaagcagaaggatagaatggctgtgcatgcccgtgttccatattaacttcaaaggcaaggaagaaggaaaggaaagaggaaaaagagaaatagaaggaggaaaaaagaatttggagagaaaataaaaggggtaaccgggcatggtggctcacgcttgtaatcccagcactttgggaggcccaggtgggtgaatcacttgaggtcaggagttcgagaccagcctagccaacatggcaaaaaccccatctctactaaaaacaaaaaattaggccgggcatggtgactcacgcctgtaatcccagcactttgggaagctgaggcgggtggatcacgaggtcaggagaccaagaccatcctggcaaacatggtgaaaccctgtctgtactaaaaatacaaaaaattagccgggtgtg[134 bp omitted]tcaaaaaaaaaaaaaaaaattagcccgtgtggtggcggcgcctgttaatcccatctactcgggaggctgaggcacaaaaatctcttgaactcgggaggtggaggctgcagtgagctgagatcgtgccagtgcactcaagcctgggcgacagagcaagatcctgtctcaggaaaaaaaaaaaaaaaaaaaaaaaaaacggtgaggaatgagaaggaaagaggtttataaaaaacagagaaacaaaaaatttcagtaacagaagctgtcaagcatactagctgccttctttatgaaaatagagataaaaatgttcaattctgggcgggcacagtggctcctgcctgtaatacccgcactctgggagaccaaggcaggacgatcgtttgaggccaggagtttgagaccagtctggccaacaaagcgagacttcatctctacaaaaacataaataaaatcaggctgggcacagtggctcacacttgtaatcccagtactttgggaggctgaggcgggtggatcacttgaggccaggagtttgagaccagcctggccaacatggtgaaaccctgtctctactaaaaatacaaaaattagccaggcgtgctggcaggcgcctgtaatcccagctactcgggaggctgcggcaggagaatcgcttgaatccaggaggcagaggttgcagtgcactgagattgcaccactgctctccagcctgggtgacacagcaagattccatctcaatcaatcaatcaatcaatcaatcaatcaatcaaatcaactgggcatggcgatgcggacctatagtctcagctatctgggaggctgaggtgaaagaattgcttgagcctggggaggttgagattgtagtgagcggagattgggccattgtatgataggcaacagagcaagaccctgtctcaaaataataagaactcaaaaaagagaatgttcaatgtttagcttaattacgactaagctgtaacggtaacatagtgcgttgactggtctaggttctgtgcctgaatgttaccaacttttcaggattgatacaaagatttaccttacaacttggcaaggcaatctaacgaaagggacagtgggggctttgcgactagttcccatctttataaacgacattggcttcatctgcattattttaaggacatcactgtgtgaactgtaccgcttttattattatgactgttttaatagacacaggaggctgggcactgtggctcatgcccgtaatcccagactttgggaggctgaggtgggaggatcacctgagctgagggaggttgaggctgtagtgaacgacaattgtgccactgcactccattctaaacaacagagtgacaccctgtctcaaaacaaaacaaaacaaaaacaaattgagatgtaacttacagatgtcaaagtgcataattcttaattgtttacatatgtgtgactttttacgtgtgtgtgtgtgtgtgtgtgtgtgtgtgtgtgtgtgtgtgtgtgtgtgtgaatccttaccaccagcacctggatcaaggtatggaacatttccttctccccagaaggttctctcttgtccttttccagttaatacctctaccccatttttctgacttctaccaccacgtgtattttgcttactcttttattttaattttttagacaagtcacccaggctggagtgcaggggcgcgatcttggctcactgcaatcaccatctcctggttcaagcgattctcctgcctcagcctcccaagtagctgggactacaggtgcacaccaccatgcccagctaattttttgtatttttagtagagatggagtttcaccatgttggcaaggcttgtcttgaactcctgacctcaagtgatccacctgcctcaacctcccaaagtgctgggattacaggcgtcagccaccgcgcctggccttttctggcttctttagcatattatatctgtgaagttcattcatattgttgaatgcatcagttgttcattcttttaaaaaaaatctgagtggtatttcattataaaaatatatcactatttataggtttattcttttgttgacagacatttggtttgcttctaatattttttaaaaaaaattttttttgagacagagtcttgctctgtcttccaggctggagtgcagtggtgagatcttggctcactgcaacctctgcctcccagtttcaagtgattctcctgcttcagcctaccgagtagctgggattacaggcatccatcaccactcccgtctaatttttgtatttttagtagagacagggtttcaccatgttcgccatgttggtcttgaactcctgaccttgggtgatctgcctacctcggcctcccaaagtgttgggattacaggcatgagccactgtgcccggcccctcaaatttttaatagacacaattggcaagaaacgtcacgtgcacaagcaagtggtaagaaacttcaaaccattttctacaagcctttaaaaaattataacaggtgaaattatgtctaaggaccccaacttctttattcattaacaaatataagtttcaaaaattgttgtaatgatgtaaatggctttttgaatccagttgagtgttttcccatcaggcacttcaaatgataatgatgctctaatttgcatgcattgttggaggagtcatccagttgctggcttgatccctgctaaaagagcataccagctgcaaattgacagaagaatctgatacacgtgaagatggggacttggaggctttatctggagctgcagctaccaggagcccccttctggtcttctccaagaactgcaccttggcttcatggccttaccttggcacctggaacatggactccttcagtatcttccagtacctggatccacagtgacacaggatgttcgtggtggacagcgagtgtcagacgtagggatcaaagacacacctccagacctcactccatactggccaccccgacaggagccttggatgaggctgctcatggctgtagatgacacaccaaggaactagagcttttcagatgccacctggccactcctgttctcggccatagcagtgttacttggtactgtcaatgtccactgcattctgtcaaatgtgtgtcatttaaagaccacaagacataacaaaaattaattcgttaaaacttattgtattttattttttaaactgagatagggtctctctctgttgcccaggctagagtgcagtggtgcaatcacagctcactgcaacctcaaactcctgggatcaaacaatcttcccgcttcagcctcccaagtagctgggactacaggtacgtgtcaccacatcgcgttaattttcaaatttttaggagagatgaggtctcactatgttgctcaggctggcctcaaactcttgacctcaagcgatccccccgtgttggccttccaaaatgctggaattacaggtgtgagccaccatgcctggcctaattttgcttacacacacacacacacacacacaagaaaattgcaatttcaggagccatgacttatgacatcattgattcctgatggggcagctcaaaaaaaacaaaacaaaacaggaccataagatggcagtattgcataacaagctttactgcacggcacttagataggtttgcatgcggggaatgtcccttccagcaggactccttccagaggaactcctgggacagaggagagttagaggcagggcttaagtgtctaggtgatgtcattgagtagcaaggtggggagagtctgcatcatagaactctgaaaggcaacaataatttggggtttcttatggctgtaagatttttcttctctgtgattaataggtgttgttgggtgcaattttatggggtatgcaaagcaggtgggctctaaatgactaaacatatgcttatttgtgcaatatttatagcaatggattgtgtgagaatttgagcttggtgctggtgggctttgagctgagaggtccctgcctgcctgctgtaaagaaataaatgagatagggctgatagaaagacactgtctttggctcacttatacagcaagtgacaaccaatttagttcagacctttcttgcttctagacctgcaccatccactcttatccacttctcattcttcctggaagctgccacggaacatgcagacccccgtatccacttttgccagtagggacacccacttttgaaaagccacggacccctggcaacgcagctgcagacataccatttaactcaccctgcctggaaaaggaaagtaaatgttttcttcccaatttttgctagggaaatccaggcacatatatgtattcagtaactcaatgatataaatttcagggcttgtgtctgtgtgttattggaaaagcatttgaggctggctgtcatggttcatggctgcaatctcaacactttggaggctgaggcaggaggctcacttgaggccaggagttccagaccaggctggacaactctacctctacaaaaaaataaaataataagccccgcatggtggtgcacacctgtagttctagctactcaggaggctgaggtgggaggattgcttgagcccaggaattcaaggctacactgagctatgatcacaccactgggcctgggcaatggagtgagattctgtctctaaaaaaaaaatgcatttgagaattttagcaaatctaagtacatttggagtctgctaatattactgtatatgggattttggtgggaccatccctaaggatttaataataaaatgtccctttatattgttgagaattttaaataattctttaaagcagttatgttctgataaatatttaataactggctcttgagtggcatggggcgctgatttgcagtgtttgccaattcctgtggtgtaaatactcccactgtggctgatttcaaggtacagatgtgataccactgaatgtgaagctgagaagagatgcatgcaattggctctgactcatgcggttgatacatgccagctccagcacatcatgacttcaagctgtcccagatgtgccctgtctgaatttctgacctacaaaaaccacgagagatgatgagtgattatcaatgttttaagctgctaagtttttgagtaatttcttgcatgctggaatactatacagctgtgaaaaagaatgagaaagggctatatcgtagctatgttatctatgagggatatattatagatatgtcatctaattcttttttacagctgtatagtatcccagctgtgaaatagaatactatacagctgtgaaaaagaatgagaaaaagacaaatacctattatagcaatttgacctcacccaacggtgagagttcattatgtaataatatcggaccaatccagttcaatttttatgtaacaaagttgtgagttgtcttccagttgccatggaccccaggttgcaagctacataatcagaacatgtccagatgagctaaaaagtcaaccacaggtggaacctaagtgctcagacaaaggagcagaattgaattaagaaacagacgccacatggcaatgatccagtatccaatcagctcgagccctggcatcacaccatcgcaagagccaatcagataatgcctcattaccctgtgactataaaacctgccccaactcccagttcaaagagacagatttgagtgttttctcccattttcttgccaattggctcacattaaacctttctcactgcaaaaacatagtgctttgctggttgatgttcccttgcatataggcaaattgatccagtttggtttgtaacagttacatatgaggctttgactctgt[135 bp omitted]gcctcagcctcccaagtagctgggactacaggcacacgtcaccacgcccggctaatttttgcatttttagtagagacagggtttcaccatgttcgccaggctggtcttgaactcctgacctcatgatccacccaactcagcctcccaaagtgctgggataacaggcgcgagccaccacgcccggcctcaagtcagtctttcttccctgcttctgttcaattcattctgacctcctccacccacccaggcagtgaatgctgcttactgatggagagggggccagaaacagaaatgataaggataccagaactgtggagtcatgttggagggaggctggtcccaagagaaacctttggattgggtgcaatggctcacgcctgtaatcctagcactttgggaggccggggcaggtggatcgcttgaggtcagaagtttgagaccagcctggccaacatgatgaaacctcgtctctactaaaaatacaacaattagcttggcatggtgatgcatgcctgtaaccccagctacttgggaagctgagacaggagaattgcttgtacccaagaggtggaggttgcagtgagctgagatcgtaccattgcactctagcctgggtgacagagcaagactttgtctaaataaataaagcagtaaacaaaagaggggtgttgaaattcctcccatgagtaatccattggatatgtgaatatattttattaagtttttttttttttttttgagacagagtcttgctctgttgcccaggctggaatgcagtggctcgatctcggctcactgcagcctctgcctcccaggttcaagcaattttcctgcctcagcctcccgagtagttgggattacaggtacttgccaccatgcccaactaatttttttgtatttttggtaaagatggggtttcaccatgttggccaggctggtctcgaactccttacttgaactcccacctctgcctcccaaagtgctgggatgacaggtgtgagccaccacacccagctctatttttatttttaatatggcaaaatacgtataacactaaacttactaccttaaccatttttaagtgtatagtcataaaaattttaatttaaatactcacataggcttgtagctactatattggacagggtcaatttccaattttttccctgagttagtaagtcacctcgtccatgcgtaattcatcactcttttatcagctggacttttgagacttagaaacaatgactttttttttttttgctgctgtattacattgaggcgtataatatttgatcaaattatgttgttagggtctggcgcggtggctcatgcctgtaatcccaccactttgggaggccgaggtgggtggatcacctgaggtcaggagttcgaggctagcctggccaacatagtgaaaccccgtctctactaaacatacaaaaattagcctggtgtggtggttggcgcctgtaatcccagctactcgggaggctgaggcaggagaatcacttgaacctgggaggcagaggttgcagtgagccgtgatggcgccattgcactccagcctgggcaacagagcgagactctgtctcaaaaaataaaattaaaaataaaagaaaagaaaatagaataataaaataaaataaaataaaatatagttgttagaataagaagcacaactggcataaacaggtttgggaatacacagcttgcactcagtgagcacacagcgagcctggtatggaagtggatgcatgtacatttcagagcaaccctgcaaggtttccgtatgaaccagcgaccatgcatcctctgtgggggatagaccttgggttcatggatgagttggttaattgggtgtcttggaggttggctgagagctcccactgttcttgactcttaagacaagatggcacatgaggtgaaagcaggtgccccagtggaggatcctagaaccagccaagtagtgaggatccaaccgcccccttgcccagagaggcaccagtggaggacgcacaggtgactcacactgccagctgagtccccccttccccatttccagtgtaaacacctggattcttttacagagttacccttgagttcactttgcccttggctctgggggaagagagagtctcctggggtctgctggattaggagatgaatgttgccaaatgaatgcttctctttccgcagctgttgcctttatgcaatgccatttctatcttcagttctttctccattaaaatgtgagccatggcctggaatgaacttcatccctctgtgtggaggaagtgtcctcagctgcccagacaggctcagcttcgggtctgtgtaggaagaacccgtggaagggagtggggagtcgagctcaaagactaacagccaagactctgggagagtggtcagctcagagtcctcaggggagggggtgtggggatgagagtccacgttattatgttacctggggcaggtgggataaaggtaagagaaggtaagtggagggattttagtggcatacaacgactgcttttgttgcagagagcttattaggaagcagatgagaggaactgagcttgcaaaaggtttgtttagaggggacccacccttgggatggatactggtggaagggaaagggaagggaagggaaacaaacaggattgggggagacagagagacacagagagagagagagagcatgagaagtccagctgcccccagctctgtagctgggatggtccctgagttgtcctgagatttggggagaggggcccgagattttatgcctccatacagatgttggtggcccggggaagggaacaagaccctggatgaggacgtgccatttggcagatgctgacctgaaggggtggacagcagaggtctgcttccagcaacattcctagaggctggggcacacatctttcatcactgaaaagatctgggtagcacagcagcgtcctcatccttgctgaaacttgtctgggatagctatggacagattttctccaaggagatttacttttccacggtgagagggtgtgtgtgtatgtgattatgtgtctctatgaaggtgtgagtgcatatgtgtgtgtcatactctatgtaactgtgtacatgtgcatgcgtgtaattatgtgcacatgtgtgactgtgcgtctatatgaaggtgtatgtgagtgtatacgtgtgtgtcatactgtatgtaactgtgtatgtgtgcctgtgtgaattaagtgcacgtgtgattgtgcatctatatgaaggtgtatgtgagtgcatatgtgtaagtgtgtgccatactgtgtgtgtatgtaactgtgtctgtacgagtatgtgtgtgtgaatgtatggtgactgtatgtgcaaccgtgtgtcagcatgagggtgtgtgtgcatatctttgggagtatgtgtatgtgtctgtgtgtgtctgtatgagagtgtatatgagtgcatatgtgtgtcataatgtatgtgtgtatgtaactgtgtgtatgaggttgtgtgtgagtctgagcaagtgtgtgcatgtgtgtgcgagtgtatatatgtaattgggtatctgagggtgtgtgaggatgtggggtgtgcaagtgtgtgcaggtgtgaggacatgtgactgtatatgtgactgtatctgcatgagggtgtgtgtgcctgtgtgtatttgtctgcatgagggcacacaggagtgtgtgtgtgagattatgattatgtgtataattaggtgtctatcagtgcatacgtgtgtgagtgtatgtaactgtgtgtctgtatgagggtgtgtgagtgtgagaatgtgtgtgcatatgtgaatgggtgtgcgtatataattgtgtgtgtatgagggtgtgtgagtgagaatgtgtgtgcatatgtgagtgggtttgcgtatataattgtgtgtctgtatgagggtgtgtgagtgtgagaatgtgtgtgcatatgtgagtgggtgtgcgtatataattgtgtgtctgtatgaggctgtgtaaccatgtgtgtgcatatacgtgtgtgggaatgaatatatgtagtcatgtgtccatatgagggtgtgtgtgagcacgtgcgtgcatatgtgtgtgtaattgtgtgtctgtatgagggtgtgtgagagtgtgagcatgtgtgtgcatatgtatgtgtcttggaggttggctggcagcgcccacatatgtatgtgagtgtaggagtgtgggagtgtgtgtaattgtgtgtccgtacgaggctgtgtgaccacgcatgtccatatatgtgtgagtgtgggaatgcatatatataattgtgtctgtacgagggtgagagtgtgagcaagtgtgtgcatatgtatgtgaatgtgtgagtgtgggtgtgtaattgtgtgtctgtatgagggtgtgtgtgaccatgtgtgtccatatgtgtgtgtgcatgtaattgtgcgtatgagggcctgagcaatgtgactgtgtgactgtcacacattgtgtgtctgacagtgtacatgtgtacgaaatgggatgtctctataatgaggcacgtgtgtgactgcatatgtgcatgactgtggatgagtgtgcatgcatgtaatcatgtgtctgatagtacatgtgactgtgtgtgcgcatgtgtgtgtgtgcgtgcctgccagtttgtgtctgtatgaaagtatttgaattgtgtgaacaggtgtgattgtgggagcatgttatgagtgtgagtgtatgtgagtgtgcttgtgattgtgtgcccatgggaaggtctgtttgtgtgtgagtacctgtgcacgtgagagtgtctgagcgagcgagcgagcgtgtgtgcaacttgcataaatctgtctggcaccagcaaagtggctcaactgtctttagagacagaggtcccttccctcctgttggggacctcttgacctgctccctcccctccagcttcacccctgtccaaggaggctgctcctgatcccaggattctactggatggggggttggggaagggtgtcacctcctttcctttataggcatgaccaggcatggcccccaccacttatgcccacatcccacagggcaggatgtagtcacatggacacgccatgcagtcagggggcctgggaaacattctctctctttaggtgagagctctggggaagaagggctgaatggacattggtggacactggctgtcctggcacagctgcccaggtgctctgcagagtagatatttgtgaaacattaagaaggccctggtggccaggtgcggtggctacacctgtaatcccagcaccatggaaggttgaggcgggtggatcacctgaggccacgaggtggagaccagcctggccaacatggtgaaaacccatctctactaaaaatacagaaaattagtcgggagtggtggtgcatgcctgtaacctcagctacttgggaggctgaggcaggagaatcgcttgaacccgggaggcagaggttgcagtgagccaagatcacgctattgcactccagtctgggcaacaagagccaaactccgtctctctctctctctcacacacacacacaaaaggccctggagacaaaggaacactccttgtccttttctcctggcacagcacaagattctgttgctacatctttatttactgagcatctagtatgtgctgcacctggcactgttttgtcttttttgttttgagacaaggtcttgctctgtaggcctggctggagtgccatggtaccatcacagctcactgcagcctggaactcctgggctcaaacaatccccccacctcagcctccctactagctgtggttacacttgcgcaccaccacgcccggctaattttttaaatttttctgtagagacggggtcttactacattgcccaggctggttttgaactcctggcctcaagtgatgctacggacttggcctcccaaagtgctgggattccaggcacaagccactgtgcctggtagtggacattgttagcagtgactaaagcagagaacgagaagggggaggccgctgtaaacacatgaagacaggcagcgtaagagaaagtcacgagggcaggaataacatccaggcatacttcagatcccagctcaagaaaccactcccaggccaggcgcggtggctcacgcctgtcatctcagcactttgggaggccaaggcgggcggatcacaaggtcaggagtttgagaccagcctggccaacatggcgaaaccccgtctgtactaaaaatacaaaagattagccgggcgtggtggcgggcgcctgtaatcccagctactcgggaggctgaggcaggagaatcgcttgaacctgggaggcagacgttgcagtgaactgagatcgcaccattgcactccagcctgggtgacagagcaagactcccgtctcaaaaaacgaaagaaaagaaagaaaccactcccagactccctgcctgggcgggatcctttgatcaagccctcaacatgccttggggctctcttcacaatggtaagtttgcatttgtttgtgtgattctaggcctcctcttattttcttgaacaggcctcatctggctttgttcatctttatgtctccagcatccagcacaatccctgccattagggtcatggcttcataaaaacgtcacgaatgcaacgcagaagtgcatgcatgcatgaataaatgaatgatgcatgaaaagagcaatctccctgtcctggaagcagcttcccctaggggtgggggtggggtgcggaggcaggggcagccagtgatgtcacaagaggtggctgggatggaacgttctggaaggttgaatggggtagaaggcctgttgtggagggaaaccacccatcctcctgcctcccaccaccaccatcatcctggctggacggagagggtgacgggggctgggaaggggcagctcatgttcaggtttccaggaggggctacctgttgactgtctttgcaggaagaagaaaacacctgagtgaccagatgtcccagctccaggtgccttgccagatggccagaaccacacctcttgaagagtgacaggtgccagtggtatgggagaagggcatgcgttttcttttcttttttttttgagacagggtctcactcttttgcccaggctatagtgcagtggcacgatctcagctcactgcaacctctgcctcccaggctcaagtgatactcccacctcaacctcccaagtagctgagattacaggcgcctgccaccatgtccagctaattttttttttttttttgagacagagtcttgctctgttgcccaggcgcaatctcggctcactgcaagcttcgcctcccaggttcacaccattctcctgcctcagcctcctgagtagctgggactacaggtgcctgccaccatgcccggctaattttttgtattttttagtagagatggggtttcacc[135 bp omitted]taccagccaggctggtcttgaacttctgacctcaggtgatccacccgcctcgacctctcaaagtgctgggattataggcacgcgccaccatgcccagctaatttttgtatttttagtagagatggggtttcaccatgccagccaggctggtctcgaactcctggcctcaagcgatccacccgactcagcctcccaaagtgctgggattacaggtgtgagtcaccacatctgaaccctacatggccttttaaaattgtgaaacatataatgcatataaaataacacaaagcatatctgtacgatttaatgaataacgataaatatctgtgtgcccttttcacttcgtgaaatcgaatattactagtaacttacaagtcctctgtagagaactcctgagctcaagtgatccacctgccacggcctcccaaagtgctgggatcacaggtgtgagcctccgcacccggccgatcgtgtgatttttaacgtgcagttccctgatgaccaaagctactgagcatcttgtccaggatttgtagccctttccaggctccttttttgtgaactgcctgtttacatttttcatcataaaacactgggttgtttacatttgtcttttaaatccagagttcttttcatactccggatactaattttatttgcccattttgcattgccataaagtaatacctgaagatgggcaatttataaagaaaagaggggcctggtgtggtggctcacacctgcaaatcccagcactttgggaggccgaggtggcggggttggggggggggggggggcttgcttgaggccaggagttcaagaccggcctgggcaatatagcgaggcccccagctctacaaaaataaaaataaaaataaattagccaggcgtagtggcatgcttctgtagtcccagctatctgaggggaagagagttccaggcagagggcacagcccgtacgaaggccccaaggaaggactgcacctggtgagttggaagaacagtgaggaggcccacgtggctgcagcagagtgaggagggggagggaggaaggaggagagcacagggaggtgcagggccttgtggaccgtggggagaacttgcgcttttacctggagggaggtgggagccatggagggctgcaggcagaggagagacagggttgggccagcatttcacttttttatttttatttatttatttatgtatttatgtatttatttatttatttatttttgagatggagtttcactcttatctcccaggctggggtgcagggcgagatctctgctcactgcaacctctgcctcttgggttcaagcaattctcccacctcaacctcctgagtagctgggattacaggtgcctgccgccgtgcctggctaatttttgtgtttttagtagagacagggtttcaccgtgtgaaccatggccaggctggtctcgaactcctgacctcaggtgatccacccgcctcggcctcccaaagcactgggattacaggcatgagccaccatgcttggcattcatttttatttgtaaacacttttatcgtggaaagtttcaaacacaaaagtagagctgatcataacataagcccccagctacctatcactcggctccaacttaaagtcagccttggtcatttctgtgtcaccccactcctcgtgggtagttttaaagcaagcaccagacagtgtgttctttcatgcatgaatcctttggcaacaaggattcctttctctaacttcaccccaaagcaattatcatactttaaggaagtaaacatcccctcttcatttcttcatgtcgtctgagacacagtcagtggtggagttcttggcggcctcgtgcacatcttgtttgaattgagatctagcagaacccacaatgcgcctgggtgatgggcctctcacgtgaccaggacctctcaggctcctgggaggaagcttaggtccaggcaggcggagagagtggatcccattttgaaggctgagctgatggaattagctaatgagtcaatgtgctaggaagagagagggagagagagaggggaagggggaagggggagggagggagggaaagaggaaggaggaaaaggaaggaaggggagggagggagggaggaaggaaggaaagaagggagggagggaaggaaagagggaagagagagggaggaaggaaggaaggaaggggaggaagaaagaaaggaagggaagggaagaaggaagaaagaaaaggcagggacggagggaggaaggaagagaggggaagaacgaagggaggaaagaaggaagggagggagagaggaagggtaggagaatgggaaaaaggaaggaaggggagggaagaaggaagtagaaaggagggaagaaagggaagaagcaaagggaggaaggagggagggaaggaagcaagtcaaaggtgaattaaggatgactttgaggttctgggccagatccagctgctccagaggggccttgggcttcctcctcatttcttcttgggccgcacactccgtgcatgtttttcatgcatatctgtagcttggtctggatctgctgttttgggctgctcgctttgtcctgctgattgatctactttgtgtgtgtaaactccgtaggctcattcaagttcactttacttatttttaaaattaaacttatttttttttttttgagatacagttttgctctgtcacccaggctggagtccaatggtgctatcttggctcactacaaccttcacctcccaggttcaagggattctcctgactcgacctcccaagtagttggaactacaggtgtctgccaccatgcctggctaattttttttgtatttttaatagagacagggtttcaccatgttggc[142 bp omitted]acaaaatcagtttttgctggtgtaagaatcacgtgcatgttacagggcttcattcaccagagggtttactcaagttttcacctgctgtgttcctgcactcactgatggaaacttttagagttcataaaacattactgcaaatctagaatccagaacaactgcttgattcttgtgtcaagcacgctctttatcatgaacaaaatcgtacaattttcctccctgaaagccactagaaaaatcagtttcaataaatgttgaccaacaatttggcctccacttcccccaggggacaaagttgacaatatctggagacatttttgattggaa[132 bp omitted]gaaactctgtctctactaaaaatacaaaattagccaggcataggctgggt[134 bp omitted]gcgtggtggtgggcacctgtggtcccagctactcaggaggctgaggcaggagaatggcgtgaacccagaaggtggagcttgcagtgagccgagatcgagccactgcactccagcctgggcgacagagcaagactccgtctcaaaaaaaaaaaaaaaggaattaacacactgagaattaaacaacctgaaggagtggtggtacaaacaccactccaaagccctcaaacagtagagtccaattaatgactatgcaaaaacccagggtagccccggaatcctgtccgctactgatgggttaaagaccatgtgatctcggccaggcgcaatggcttacgcctgtaatgccagcactttgagaggctgaggcgggcggatcacttgagcttgggagttcgaaaccaacctggctaatgtggtgaacccttgtttctactaaaagaatatttttaaaaattagctgggtacggtggcctgtaatccctgctactccggaggctgaggcacgagaattgcttgaacctgggaggtggaggctgcagtgagccgagattgtgtcactgcactccagcctaggcgacaaaaccaaaccaaaccccatgtgatcttaagtctgattactgataagtgttttcgaaagaggtggcattgatttttaccacgatgaatgagagcacctgttttcccacattttcataatagacaatattgtcagcttttttgatcttacttaacctgaaaggtgaaaactgcatcatattttctgttgtatttctcataggactgagtttgagcatgtttacttctttttaaaagtcatttttcagtttcagataattatctattcatgtcctttgcccgctttcccattgggttttggtctttttctgattaattcctcagggttctttacatatgagggaaatcaagcttttatactttggatgtattgtccacatctttccccaatttgttgttgatctcttgatttttgtttgtggtattcttggccatgtggaaaatttaaaaattttatgtagcaagacttatcctgtttctcctttaggccctttgagttttcatgttaatattacctttaagagaagataaatgtgtggtcccatgagagtttctttcccctgggaggcttcaaaatattttctcacccacagaattgtgtatagacccagactttatattctaacaatttaagagactcttctgtaaactcacagattgaataccctctgggttttacaaatgctctattatctggcatgccggccactctcctctcctcccaggcccaggacaggcatgaccaatggatcctaggattctaggcagacatgaccagtggatggaagagttggcctcatccctacagcccctttgccaatcctgttaaactccctgcttttttgctttgcagtgctgtggagcatggtttctgcacacctggaatgactggaaccccaaagactcaagaaggagctaaagatcttgaagtagacatgaataaaacagaaggtatattgcactaaagagtacgtgggagagagagtggcacattgattccacaaaggctctttgcagaggagtctggatctagaaagatgtagccattccttgcctgaccctgctgaccccgaccccccacccttttgttttgagacagggtcttgctctgtcacccaggctggagtgcagtggtgcagtcatagctcactgcagccttgaccttccaggctcaagtgatcctcctgcctcagccctccaagtagctgggactacaggtgcacaccaccatgcccagctctgtattttttttgtagagacagggtttcgctatgttccccaggctggtcttgaactcctgggctctagcaatcctcccaccttggcctcccaaagtgctggaattacaggtgtgggccaccgtgcccagcctagggcctattttctattcttgataggttgttgaggtagcagggcaagttgttcacataattcagagctctgctctactggtgatgtgacactgggcaagtcacttgctctttggaggcctcatttgcatatctgaatgatgggggcattgataacagcacctccctgtcaggttggtgagcccgagtggataaagtacccaggaatcatccatgtagatagggtgcggatatgatcatagtgatttattaacattaggctataatcattttactgtcagagctaaagtcaagggacatggtgacatcatagacagctctgataccagtgggttgggggaggtccccaaacgccggtgggacctcgaacccagccattatccaggctcttgacaccatcgagagtgaattcaagaaacaagtcagaaaatagtgaaagtgggccggg[133 bp omitted]ggtgtggtggcgggtgcctatagtcccagctattcaggaggctgaggcaggagaatggcgtgaacccggga[137 bp omitted]tacacattcaaggagagggagtgcaggcgtgcttgaaagatagcatcacacacaaaggagtttggggatgctacctttatgggtccaaagggtggaatattcatctaaatccctagaaaactggccgggcacagttcacatctgtagtttcagcactttgggaagctgaggcgggcagattgcttgaggccaggaattcaagaccagcctggccaacatgacaaaaccctgtctctcttaaaactacaaaaattagccaggtgtggtggcacatgcctggattatagtgagtctcaacttattgcaacctctgcctcccaggctcaagcgattctcatgcctcggccacccaaacagctggcattacagtcatgcaccaccgtgcctggctaattttttttttttaacaaagcgccccaaagtgggtgtctgaaacagcagaaatgtattgtctcacaattctggaggccagattactgagatgaaggtgtgggtagtgaggttgcagtgagccaagatcacaccactgcattccagcctgggcaacagagtgagactctgtctcaaaaaaacaaaaacaaaaacaaaaacaaaaacaaacaccagtcattggatttagggatcaccctaaatccaagatgatgccatgatgtcatctcaagatccttcactaaatccacctacaaaaaccctgtttccaaatacggtcacagtctgaaattctgggtggacatgaattttggaggttcaccatgtaacccactacagtcattaaaatatcccacaagtgtccaggtgacacctccatgtttttgtccaatttaaagcatctccactcccccctgcttcaggctggggtcaggaaggcatgataaggtgctctttgagttcctagatgctcttctcctcatcacccccatctccccaggtggtttctttgtgagctggtgctgactcccagagctgattagctcgggaaagtggggttgaagggggcctgtatgaactaggcttcccttgttgtaagttgttatgagattaattgtgcatctccaattcctttgtggaagtcctaacccccaggtgctcagaatgtaaccttgtttgggaataggatcattgaagtaatttggtttttttgttgttgtttggttttgttgttgtttttttgttagttagtttgtttgtttggtttttgagatggagtctcgctctgttgcccaggctggagtgcagtggtgcgatcttggctcactgcaatctccacctcccgggttcaagcgattctcctgcctcagcctccagagtagctgggacaacaggcgcgtgccaccacgcctggctaatttttgtatttttagtagatacagggtttcgccatgttagcgaggatggtctcgaacttctgatttgaagtgatccacctgcctcggcctcccaaagtgctggaattacaggcacaagccactgcacccagcctactgaagtaattagttaaaatgacgtcatgaggttaggtcccaatccaatgtgaccagtgtctttataaaaggaggaaatagagacgaacctgcacacacggagaatgtcatgtgaggatcgaagcagagtttgcagtgatgcacctacaagccaaggaatgtcaaggattgccggcaaccgcagctaggagaaagtcattggtcagattctctcccacagcctcagaaggaaccagtgctgcctgcaccttgatctcagacttgtggcctccagaattgtgagacaatacatttctgttgtttcagacacccggtctggggcactttgttattgcagtcctagctaattaatatatcagtcataccagtgtctgttttttttgttgtttttttctttttctttttttttctttgagacagagtctcactctgtcacccaggctggagtgcagtggcacaatcttggctcactgcaacctctgcctcccgggttcaagtgattctcctgcctcagcctcctgagtagctggaattacaggtgccctccaaccacgcctgactaaattttgtatttttaatagagacgaggtttcactatgttggccaggctggtctcgaactcctgacctcaagtgatctgccggcgtcggcctcccaaaagtgttgggattacaggcatgaaccagcctgctgtctgttgatgactatctgaacatacatctccagtccttgggtcctactactggcaccaagccaagagcctttagaagcccatctatgaggcccatgtctagtcaaggggaaaaagtagcatcccggccgggcgcggtggctcatgcctgtaatcccagcactttgggaagccgaggcaggcggatcacaaggtgaggagatcgagaccatcttagccaacatggtgaaactcatctctactaaaaatacaaaaattagctgggtgtggtggtgcccacctgtaatccccgctacttgagaggctgaggcaggggaatcacatgatcccaggaggtggaggttgcggtgagctcgcatgatcccaggaggcggaggctgcagtgaactgagattgtgccactgcactccagcctggagatagagcaagactccatctcaaaaaaaaaaaaaaaaagtagcatcccatcataggtggatgtgcaatttccttccaacacagctgcctactctaccattgccatctaccacctccccagtagaccaggttcagttgaacaaacgcaaggttacacacccaattctccaagagggtctcttggactttctctcacttgcccgttactgggtggtagtgagaaacacacaacaaaccaacaactgtctccagaggaaaccctgttctcttctttctcagtgtcaacccttactcatccccaaaagaagtgatagatacaggaccccaaaactggttttgaattggtccctttgctagttccatttggctgatctgggtgatgtcgctgtgacaggcaaccccctcaacaaccccctcaacaacctcaatggcttaacacaacacaagtgtgtttcttactcatgttgtgtgtctggcattgggggagaggggctacttcttcacatttgctccaccatttttgtgacaggacaatggacgatggggaattatgcaccgggtcttaaatcttctccccatgaacgacacacataactcacttcttatgtttcattggccaaagcatacatagtccactgcatgtacattttacctttaaaaaaatctccgtaaataatattaaatatgtgactcttgttaatgatttacatgcaagggtgtttaagggtaaatggatgaatagctttggctcacttggaaatgcatcaaaaaatcagatggagccaggcgcggtggctcatgcctgtaatcccggcactttgggaggccgaggcaggtggatcacttgacgtcaggagttcgagaccagcctgggctacatggtgaaaccccatctctactaaaaatacaaaaattagccagatgtggtggcgggtgcctgtaatcccagctactcggcaggttgaggcagaagaatcgcttgaacctgggaggtgtaggtcggggtgagccaagatcacgccactgcactccagcctgggcaaaagagtgagactccgtctcaaaaaataataataggccaggcgcggtggctcatgcctgtaatcccagcactttgggaggccaaggcgggcggatcacctgaagtcgggagttcgagaccagcctgaccaacatggagaaactccatctctactaaaaatataaaattagcgaggcgtggtggtgcatgcctgtaatcccagctactcgggaggctgaggcaggaaaaacgcttgaacccgggaggcggaggttgcagtgagccaagatcgtgccattgtactccaacctgggcaagaaaagcaaagctccgtctcaaaaacaaaaacaaaacaaaacaaaataataataaaaaaaataagatggggccaggtgcggtggctcatgcctgtaatcccagcactttgagaaactaagggaggaggattgtttgagcccaggagtttgagatcagcctcggaaacacagtagaaccccatctctacaaaacattaaaaaataaattagctaggcatggtggtgtttgcctgtagttccagttatttgggaggctgaggtgggaggatggcttgagcctaggaggtcaaggttgcagtgagctgtgattgtgccagtgcactccagcctgctgacagagcaagaccgtgtctccagaaaaaaagaaagaaagaaaaaaaaaatggacataacaaagacagcaggatagatgtgtgataaaatatggtaaaacgctagcagttgtagaatctaggtgttggataagaaagtatttggtatacaatccttttgactattaaaatttggcggggcggggaatgaaaaaataaataaagagaaaggaagcttgtcttgccagtgttgaccacataacttcaccctagaaggggattaattcaactctcagcaccttaggtccaaaaagacaccaaccgccccccgtccaaagttattaaataaataaaaacatttgccacccaactctggtgactatttgcagttactcccaggctgtggaccacctgtcgagatggagaagtccttctgaggctatccaaacacggaccaggccatgagaccccgatgaccatccctgaattttttcgagagtcagtcaaccgatttggaacttatccagccctcgcatccaagaatggcaaaaagtgggaaattctgaatttcaaccagtactatgaggcttgtcggaaggctgcaaaatccttgatcaaggtaagattcattcattcattctcctttgttcaaccattcattctgaataggtaacagacatacatacatgtggtacaaaattcacaaggcaccaaaagatacaaaggttaattggcgaaaatttccctctgattcatgagcctcagccactcagttcctctctgtggaagcggtcaccattgtcagttttttgtgtgtccttttgggaaataaattatgcataaatataaaatgaaatttttatatatgcaaattttttacacacataatagcctactacacccatggttctgcatcttgcatttgtccctaacatactatctctatgtttttgttagttgctgctgcataacaaattatcccaaaatatagtgacttgaaatgacaaacatttatcatctcacagtttctgtggattgagaatttaggagctactttgaaattgggttcttctggctccaggtctctcatgaggttgcagccaagctatcagctggggctatctcatctgaaggctcaactggggctggaggcttcacttccaagcttacttacctagatgactggttgttggcaggaagtctcagctcctcattccatggccttctccacagaattgcttgagtgtcttcacggcatggttgccagtcacccctagaatgaatgaagcaaaagaaagagggaacaaggctggggtcagtggctcatgtctgtaatcctagtgctttgggacatcgaggcaggaggatcactgagcccaggagttcaagaccagcctgggtaacatagtgagaccccagtctcaatgaaaaatttaaaaagtagccagatgcagtggcacatgcctgtagtcccagctatcaggaggctgaggtgggaggatcacttgagcctcggaggtcgaggctgcaatgacctgtgattgcaccattgcactctagctgggcaacagagtgagatggtgtcataaagaaaaaaaaaaaaaaagagaaccatgtgcttgggctgggtttcttcttgggggccccaccttcatactatgttgctgtggctagttcatctctcctgaaagatggtctcctttagccatgttcttagttccgtggagttaaaggtccccctcctcccgtaaatcttggacacctgactgagcacggtggctcatgcctgtaatcccagcactttgggaggccaaggtgggcggatcaaggtcaagaggtcaagagtttgagaccagcctggcccacatggtgaaaccccatctacactaaaaatacaaaaattagccaggtgtggtggtgcacacctgtaatcccagctactcaggaagctgaggcaggagaatcgcttgaacccgggaggcagaggttgcagtgagccgagattgtgccactgcactccagcctgggtgaaactccatctcaaaaaacaaacaaacaaacaaaacttggagaccgaagtagaaacaaaaccaaaaataaaaacaaacaaaactacttggagacccaagtagaaattagtcggtgtaactaggcattaataaaaacacactctgtccacaataaagccagccttttggttactgaaatacttggcatctcattctgaaggaccagcaggcaaatgccttccaaatggttccttttcccccaagaacagcagatcattgccagccgtgatcccgtatgactaaaagagccaacaacgttggttggcagtacccagaacaaagagggagttttcccctaaggatgctcacttttgtttctgagtttcctggttcattctcacccacattcagaacaagtctgtacctttacatgtgcaacttttttttttttttttttttttagacagagtctcactctgttgcccaggctggagtgcagtggcacgatcttggctcactgcagcctcagcctccaggttcaagcaattctcctgcctcagcttcccaagtagctgggactacaggcaggtgctgccacgcccggctaattttttgtatatttagtagagacggggtttcatcttgtgggccaggctggtctcgaacttctgacctgaagagatccacgtgccttggcctcccaaagtg[210 bp omitted]cagctactcgggagggtgaggcgggaggattgctggagcctgggaagttgaagctgcagtgagctatgatcacccactgcactccagcctgggtgacagagcgagacaaaaaataataataataaaataaaataaaataaaataaattcacacctttcaagatagctattctttaaaaaatagcaaaacacaacacgtgttggggaggatatggagaagctggaacccttgtgcagtgctggtggaaatgtaaaatggtgccgccactgtggaaaagtctggcgatttctaaaaaaagaaaaaatgtaaacagagaattgccatatgattcagcagtctcactcctggatatttaacaaaaaaaaaaaaaaaaaaggaaagccagagacatgaagagttatttgtagactcagggtcatagcggcgttattcacaagagacagagggtggaagcagcccgtgtgtccatcaatggaagaatggataaacacgatgtggtccgcccatacaagggaatatgattcagccacaaaaaggaaggaaattctgacacatgctacaacatggatgaatcttgaggacatcatactcggtgaaataagccagacacaaaagggcaaatcccgtatggtttctttcctaggaggtccctagagtcgttagactcatagagacagaaagtagaatgggaggtgccaggggctggggaaggggatagagagtgagtgttttatacagagagtttcagtttagaaagaggagaaagttctagagatgaacagtggtgacggttgtacaaccatgtggatgtgtttaatgccactaaactacactcttaaaaatggtcaaaacgggctgcgtgtggtggattacaggcgtgagcactttgggaggctgaggcgggaggattgcttgaggtcaggggttcgagaccagcctggccaacatggtgaaacgctgactctactaaaaaaacaaaaattagccaggcgtggtggcgcgtgtctgtaattccagctacttcggaggctgaggcaggagaatcgcttgaacccaggagacggaggttgcagtgagccgagatcgcactgctggactccagccttggcaacagagtgagactctgtctcaaaaaaaaaaaaaaaagaaaatggtaaaatccatgttatagatattttaccacaataaatgaaacaaaacataaaaataaaaataataaatggtgtgttatgtagagggaggtaaacaaacctcccgtagtcataaaaattaaaaatattacacctcagattttaggctcaatgctgtctcccaccccgtgtggctacttttgttttgttttgaaacagggtctcaatctgttgcccaggatggagtgcagtggtgcaatcatagctcactgcagcctcgaactctagggctcaagtgatcctcctgcctcagctacccaagtagccgggacgacaagtgtgtaccaccatgcccggcgaacttttccactttttttgtaaagacaggggtctcactgtgttgcccaggctggtctcgaacttctggcctcaagcaattctcccacctcaacctcccaaagtgctaggattacaggtgtgagccactgcgcctggcctccatgtgactacctttgattctgtcgtcacatatcctaatgatataacatctctgtgtttatgttttgtttttctgtttgctttttccttcccagctgggtttggagcgtttccacggagttggtatcctggggtttaactctgcagagtggtttatcactgctgttggtgccatcctagccgggtaaggtcattggcttggttcatggtgagggttaaggagccgctaccctgggcctgggacccctgggcttgtccagtgtgagatgcaaacaggaattttggatgaacgccctagttagcaggcaggatagatgcacgaacaaatcattctgatcacaggtcatacgcaataacacccattagactagcagtctcagacctctcgattttcttcagctgaagaactttttgcagacaaaataataattgtagatagcatttagaggtttctgattatgtgcagaagcattgtgctccacgtgtatgatcctgtaaaacctcacgacagcaatgtgaagtgggtcctatcatcccctatctacagatgaggaaactgaggctcacacagccagtgggcagccttgaagtcttgggctcatgcgatcctcccaactcggcctccagggtaactgggactatgagcacacaccaccacacccagctaattttttttttttttttttttttgagacggagtctcgctctgtcgcccaggccggactgcggactgcagtggcgcaatctcggctcactgcaagctccgcttcccgggttcacgccattctcctgcctc[168 bp omitted]gatggtttcttgctatgttgcccaggctgtaatcgtgaaaaaaacaaaagtaaaaataaaatactgatttcttcttgagcttgtaattctacctttgggagttttacttaaagaaacaaaaccaaaacatgaatatattttggcttatgcacaaagatacttcttggaagtgttattagtgatggcaaaaagtcggggacaacctaagtgtcccacagctgtggattaaaccatgagatgccttctggatgggattctcggtaatattttgaaatgatggctctgaagagcacattttaagcatttttgatgtcagaggtgacaaagcaggtatcaaaatctttatacactgtatggttacaactatgcttaaaatttaaatatcaggccgggtgtggtggctcacgcctgtaatcccagcactgtgggaggccaaggcaggcggatcacaaggtcaggagatccagaccatcctggctaacatgctgaaaccccatctctactaaaaataccaaaaaaatcagccaggcgtggtggcaggtgcctgttagtcccagctacgcgggaggc[144 bp omitted]atataccaattattgctggtcactcttacctatatgatatcattgactgctcatggtagccctttgaggtaggtgccatcatgatcccaagtaataatgatggtgacgataatctgggaccaatagaggttaagtgtcttccccagaatcatgctgtggttggataaagaccctgagatctgaactcgtttgttcgactcaagattaataataacaacagcaacgacagcagcagcagcagccacggccatgacaaaattgagcggctgggcacagtgactcatgcctgtaatctcagcactttgggaggctgagatgggaagactgccttagcccaagagttcaagaccagcctggacaacatcgcaagattctgtctctaaaaaataaaataaaagtgtttttaaaattagccaggcatggtggtgtgtgcctgtagtcccaactacttgggaggcagaggtgggaggatggcttcagcccaagaagttgagactgcagtgaattatgatcataccactgcactccagcctgggcaacagagtgagaccctgtctggaaaataaaagtaaagaaaagaaaagaaaagaaaaggaaaagaaaaaagaaaagaaggaaaagaaaaaagaaaagaaaagaaggaaggaaggaaaagaaaagagaaaagagagagaaaaaaattgagggtggtgactagaaataaatattaacattagttatatctcatcatcgagactaacaccaccctaatatgttatattctattttccaaatttttatgagcatatactacccctgtcttacagtgagttgaaatatatatatattttgaggccgggtgcagtggctcatgcctgtaattccaacactttgggagtggaacacctgaggtcgggagtttgagaccagcctgaccagcatgtagaaactctatctctactaaaaaaaaccccaaaaaattagccaggcgtagtggcacatgcctgtaatcccagctacttggagggctgaggcaggagaatcacttgaacccgggacgcagaggttgcagtgagccgagatcatgccattgcaatccagcttgggcaacaagagcaaaactccgtctcaaaaagagagagagagagagagagagagagagagaaaattattattatatatataaaatatataatacatataataaataatatataatacatataataatatataatatattatattatctatatagagagaggtggagtctcactctgttgcccaggctgcagtgcagtggtgtgatcttggctcactgcaacatctgcctcccgggttcaagtgattctcctgcctcagcctcccaagtagctgggactacaggcgtgcgccaccatggctggctaaattttgtatttttggtaaagatggggtttctccatgttggccaggctggtctcaaactcctgacctcaggtaatccacctgcctcagcctcccaaagtgctgggattacaggtgtgagccactgtgcccagcccagaataaattttaatgaagagatctgtccccattttaggactgaatggtaagacagtgtcatgcagtgattgggctctggtgccacatcagacccaaattcaaatcttgggttgtctgctattttgtattctgtatgaatgagcaggaaagcacacatctccatgcctcacagggctgttataaagattcaataagaggatgcttcataaacccttagcacagtgcttagcaaatagtatgtgcttaagaatggtgatgagagtaaccatctcaaataattataatgtgcctcattccctgccatattaaaagcacaacaactagatcaacagagcagagagcccagaaatagctccatgcatacatggtcactggcttccaacaaaggcagcagagtagttcagtggtgctggaccaactggatatttgtatggaaaaataaatcagccctgatccctacctcacatcatatgcaaaaattaaattgagatggattacagactaaatcatgcaagttaaattctaaagcttctagaaaaagaaaagcacggaatggtttcacaacctgggggtagtcaaagatttcttagacaggacacagagagcaaaaagcataagagaaaaagttgccaaataggactttattagcattaaaaacttctgcttattaaaagacaccaacaagatgaacagttgtcgaacatggtggctcacgcctggaatcccagcactttgggaggcaggggtgggtgggtcactggagtccaggagtttgagaccagcctgggcaacatggtgaaacaccttctctacaaaaaatacaaaaattagccaggtgtggtggtgcatacctgtaatcccagctactcaggaggctgaggcatgagaattgcttgaatccaggaggttgaggttgcagtgagctgagattgcaccactgcaggccagcctgggtgaccgagctagaccctgtctcaaaaaaaaaaaaaaaaaaatggtgaacaggcaaactgcatacttggagaaaatattcttaaaactcgaatttctaacaaaggactggtatctaagatagataaagaaattctgtaactcagtaataaaaaggcaaaaaaaaaaaaaattgaaaggggcaaaagatttcaacagaaatgccacaaaggaaagtagccaaaaggcacatgtaaaggtgctcaatgtcattatccattgggaaatgcaaattaaaagcaaaagaggatgcaccctgcaagcacaaaaggctgtgaatgatgggaacagaggctgagtcaggagttcagatcctaggtctaacacctacttgctgtgtaatcttgagtgacttcactgctgggcccctgtttttctcatctataaaatgcggtgttctaagtgttccatgacctgttgtcatagtgacatcataggagctgtcacttatcatcattgtcatttttgttgtcttcatcattgttaagttggggaggaagggaagctggtgctgtggctgcaaacttaagaacttgcctgcaaacctttcctctcttttgaccttccagaccattctgcctttaaggtgtgtgtggatgcacacacgaatttgttttcttttcccaggggtctttgtgttggtatttatgccaccaactctgccgaggtttgtcaatatgtcatcactcatgccaaagtgaacatcttgctggttgagaatgatcaacagttacagaaaatcctttcggtaaacccctacccagcactgcctgccaaagtcacccaggggtacctcagggctctgggcaggtgttctttttttcccaggtaaattctaatgataagatagggccatgcatctgttcagcgagtcctccatgacctcattagtatatgtggtgaagctatttttggagaagcagactgaaatagaggagtttgatttccaattcatattaacttagtttaatactcagcctccatttttttttttttttcgagacagggtctcactctgtccccaggctggagtgcaatgtcgtgattgtagctcactgtagccttgaactcctggtctcaactgatccttctgcctcagtcctccaagtagctgggactacgagcgtgtaccaccatgtcaggctaactttttttttttccgagacagagtctcgctctgtcgcccaagctggagtgcagtgggctgaactcggctcactgcaagctctgcctcctgggttcatgccattctcctgcctcagcctcccaagtagctgggactacaagtgcccaccatcacgcctggctaatttttttgtatgttttagtagaaacggggtttcacc[140 bp omitted]tcatgcttgtaatccgggcactttgggaggccaaggcaggcagaacacctgaggtcaggagtttgagaccagtgtggccaacatggtgaaactccatctctaccaaaaaatacaaaatttagccgggtgtggtggcatgcacctgtagtcccagctactggggaggctgaggctgaggtggcaggatcgcttgaacctgggaggtggaggttgcagtgagccaagactgagccactgcactccagcctgggtgacagagagagaccctgtctcaaaacaaacaaacaaacaaaaaccattttttttttgtagagacagagtcttgctatgttgcccaggctgctgttgaacttctggcctcaattgatcttcctgcctcagcctcccaaagtgctgggattataggcatgagcccccatgcccaaccttaagcccccacttaagtaaaagtattaatatatttatgtattattttatatacatcccactgctaattattttttcttttagaagtgtgatgatttcaagcccatgctactatataattttcttcatttcttgtcattgtcttcatttctagatgcttttgttgttctcttctatttcttgcctaagttctatcccttcctgtttcatttttttctagtgtcctgctgtctcttccctgagtgcttgtatgtttgctttgtgttcttcctttctagctgtgtttgcttcatta[141 bp omitted]ttcacgtcattctcctgcctcagcctcccgagtagctgggactacaggtgcctgccacca[137 bp omitted]acctggccttggttacaattttcttttgcattgtgttgaaattatccagtgagttttatttgtgtacagtgaaatttagctgctgtcttacgtttttttttttttttcattgtagtgtctttgtatggctattgtcgaaactttaaatttcctacatgtttgaatgagctgcagtttgctgtatcagcttttggcaggagggtcctggagaggaggggagtccctgggaggggtgagcctagatggctaggttcatttcagctcaaggaccactgtgactgtttcttgaatacatgatttcatgactctgagtcactcatttcttcactttttcacatctctggagtcgagatgtgtcttttcattgatggcattctctgatcactactggccatatgttttctcacattttattctctccgaaatttgggtacagtttccagattcaatgaaatcctagctagactcagtgaaatacaacactttctcctgcctggcttcctttgactcctaattcctgacttggttcaggaaggacagacctccacctctggcctagagcttttaaaaattcttttcttttttctttttcttttcttttctttttttgtttgtttttttctttttttgagactgtctcactttgtcgtccagtctggagagcagtggcgccatcttggctcactgcaacctccacctcccaggttcaagtgattctcatgcttcagtctcccaagtagctgggactacaggtgcacaccaccacaccgggctaatttttgcattttttgtcaagactggatttcgccatgttagccagactgctcttgaactcctggcctcaagtgatccaatggccttggcctcccaaagtgctgggattacaggcatgaaccactgctcacaaaattactttcttaagtgatgcatcggtggttcccaaaactcatgtcatacctgtttgtcctcttcctagcagaacacactatggggtgggtgctggtgggtgggtggggtccttcttccagctgggaatgctggcttaatttgagttttccataactggaaaatgccacatacacaaccttcccctctacacccacctggctgctgtggatttctgtcctggttctagcaggtccagcattaagtgaataaagcaatatctgaattatttctgactcctagtttcattgaaggtgaagtctgtggaggatttattgttccagttgctaggtctagaagattcaaaaccaggttcctgacatgcttctcccaaattggatgcccagctccacttggagatctttatttgggggagtaatcacagatcctcctctgcttataatcctctaattctctagcggttttctgttggagttaaataaactccaaactcctcatctttgcctccaaggctccgctgatctgggcctcaccattctttcatgccccctcccctatcatactctcttgggtccccactctggccatcctggactttttgtatccctcagacatcccaagctgttgcctgccccaggctccttgaatgtctgtttcttcttctctctggaaaactcctgtccagctgctatacgggcttctgccatcttttctctccaatgcatgccagaggcgtggttatgattagcaaaatggatgttgcaagtaactttttcattggattggctagaagtgtcatagagagaccccatcccgctttctttggcatgaacagagtataaaaatctcgcaggggccggg[138 bp omitted]gtggcgggcgcctgtagtcccagctactcgggaggctgaggcaggagaatggcatgaacccaggaggcggagcttggagtgagctgagatagcgccactgcactctagcctaggtgactgagtgagactccgtctcaaaaaaaaaaaaaaagaaagaaagaaaagaaaaaagaatcccgcaggtcacctgaaccttaccgtgctaggtatgggtagagggctctgcacttgtccaggttccagccaacttcatgaaggatttttattgcctgactccgagtaaaaggttagctaaatctgggctgcaaggtgcaaagtcctggaaaaggaagagccatgagggacttcttttagctcatcaaccaagatccacaattctgtgtagcataatttggtcagagatgtgttgtctcgggcagactattgtcatcctctaccgacactgttggaagctactgatatggactacaaagaatccaggagtcctgaaaccaagtcatttggagtcagtcaagaccaatagca[145 bp omitted]accccggctctactaaaaatacaaaaattagctgggcatggtggcacatgcctgcaatcccagatactcaggaggctgaggtgggagaatggcttcaacccgggaggcggaggttgcagtgagccgagattgggccaatgcactccagcctgggcgacagagcaagactgtgtctcaaaaaaaaaaaaagaggctagagttgctggagagagcttacttaggacatctaacccagctttagtctttcccagggctgggttgccatgaagcccacagggaactttctttcagattccacagagcagcctagagcccctaaaagcgatcatccagtacagactgccaatgaagaagaacaacaacttgtactctgtaagtgtgggaggtgggcactggggaaaggggagggcggggccttgcaagaaaagtgggcgtggcctaagtggaaggtgagcagagggaggaggtcggacctggcaagggtgggaactctcaaaggaagtaggtggggactctcaaaggaagtgaaaggtgaggaaaggaagtgggtggggccttgtgaggaaagtgggtgtgacctttcaaaggacgtgaaatgtgagcagagggagggggtgtgaccttacaagggaagtgggtgtggcctttcaaagaaagtgggaggtaagcagagatggaatggggcctcacaaatgtggtaggtgggggtttgcaaagggatgtgggtggggcttcataaatgtagtgggtggggctttgcaaagggaagtggatgtggcctttgcaaagggaaatgggaggtgagcaatgcgtgggggcctagcaaaaggacgtaggcgggacctttgggacgcatttttcccttctggcatgaagggactgattaatgaacagtgtctgttctggctaattactgctgggcaacaaatcaccaccaaaactggtggctaaaaaaaatcagtcattttgttattaattttttcccaagaacattaagataattaaacaatatactaaaaagttgaaaattatgttaaaactaacaacattaagtttaaatattttatttatacccaagccaaaatttgttataacaatgactaagacaaccaattagaattgcagacttctcaggagatcgagaccatcctggtcaacatggtgaaacaccgtctctactaaaaatacaaaaattagctgggcatggtggtacgtgcctgtagtcccagctactcaggaggttgaggcaggagaatcgcttgaacccgggaggcggag[186 bp omitted]aaccccgtctctattgaaaatacaaaaaaattatccaggcgtggtggtgggcgcctgtagtcccagctactcgggaggctgagacaggagaatggcgtgaacccaggaggcggagcttgcagtgagctgagatcgcgccactgcactccagcctgggcaacagagcaagactccgtctcaaaaaaaaaaaaaaaaaaaaaattacaaactttttagaggttcaaagtgaccactacagcaacagtcttaagtctcggataacttaaaagactactttgttagcaataacacttacagcagggtttctcaacctccttgctgttgacatttggggcaggtaattctctaaggagctgtccgacgccctgtaggatgttgagctgcattgctggcctccactcactggatgccaggaatatatcccctgcctcccacttgaaacaaccaaaagtgtctccagacactgcctaatataccctggtggggggagggtgggcggtggtggagtagtatcacccctggttgaagacgctaatttataggggagagtcacatagaagggcatctactcctctgcaagggagagtagaacctaccattttaagattctgtttaggctgggcacagtagctcatgcctgtaattgggaggctgaggtggacaaataacctgaggtcaagagttcgagactagcctggccaacatggagaaaccctgtctctactaaaaatacaaataataataataataataataataataataataataataataatcgcccaagcacagtggctcacacctgtaatcccagcactttgggaggctgaggcgggcagatcatgaggtcaggaggtacagaccatcctggccaacatggtgaaaccccgtctctactaaaaaatacaaaaaattagctgggcatggtggcatgcgcctgtagtcccagctgctcaggaggctgaggcaggggaatcacttgaacccgggaagcggaggttgcagtgagccgagatagtgccactgcactcaagcctggcgaaagagcgagactccatctaaaaaaaaaaaggctgggtgtggtggctcatgcctgtaatcccagcactttgggaagccgaggtgggtggataacctgaggtcaggagttcgagaccatcctgaccaatatggtgaaaccccacctctactaaaaatacaaaaattagccgggcgtggtggcacgcacctgtagtctcagctactcaggaggctgagagaggagaatcacttg[131 bp omitted]aaaaaaaaaacagccaggcgtggtggtgcatgcctgtccaagctactcgggaggctaaagaggatcacttgaacctgggaggtggaggttgcagtgagctgagatcacgccattgcactccagcctgggtgacagagcaagactcttgtctcaaaagaaaaaagaaagaaagaaagaaaaagatttagtttaggacccagaaatgagcaaaaacgaatgagactgagaaagtggactgtgacatttgggaaggaaaatggccgagtaagacaatgaactgtgccagttgtgatgcttggcatctgtgtgcccaacagactgaggaccaacccagatctccaagacaggggattggattggaccagcatgggtctggtgcccatcccaatccagtcatttgtggctgtggaagccgggggtcttctaccggcctttgaaggaacaccctttgtagggagacctaggggcatctctgagaaaggacaggttcccccagagggcttgtgtgtgctcttcctctcacccttgccctaccttgttacagattatctgggcaaagggctttgcctgctcagatgaagccagcatcaccctgggcaggtttcaggcaacactggccatctgtagaggactttgaggggccttttttttttttttttgagatggagtttcactctgttgcccaggctggagtgcagtggcgtgatcttggctcactgcaatctccacctccccatttcaagcgattctcctgcctcagcatcctgaggagctgggattacaggcgcctgccaccacacccggctaatttttgtatttttagtagagatggggtttcaccatgctggccatgttggtcttgaactcctgacctcgtgatccgcccacctcagcctcccagtgctgggattacaggtgtgagccaccgtgcctggccgaggggcctccatctttaagtcagcgcatcaccctcatccagtgctttgttgggggttcaatggtagaatttctgcagatcccatgtgatgctcagtcgatacaacccaagagttcactttgcggcaccgaattctgtcatagttaagagcacaggctctggagtcagaccttgggtttgaatgctagctcctctcttcacttgccttaagtaatctgccttgggcaagtaatctaccacccctgagcctcagcttcttcacctgccagagtgaggcaatgcatcaattatcaataaggatgcctttggtcgtaagtgacaaaagtctgaccccaaatggcttaagcaacaaacaaacaaaaagataatctgttggaccatgcaactacagttcagggcgtggatttcaggcatggctggaaccaggggctcaaagaatgtgcccaggctctattttcctttctctatttcttggctccgctccagccttgctttctcacatagtcctgagatggttcagcagctcctagagctacatcttgactcattcacatacacagtctgtgtctcagaattcccaggtaaagtcttcatcttcattatgattggaccacttgaggtcacatgtccagacttgatccaatcaccataacccaggctgatagaacagtttgagccaattagggttgacttccagatctgtgggtgaagtcagccccatccaattggtgactaagaagtagagtggggagtggaatttgggaaggcagcgaacaaataatacctaactccgtagaacacttaccacctgccaactactattctgagcactttgcatatattaactctcttactgcttagaacaacccaaggagttgcgtcctgacatcattcccattttacaaatgaggaaactgaggcacagggagcttaagtggcttggtgacgctgcgaggaagtggcagaactggaagcagagatcttgggacttttgtaagaggtgccaggactggcacatcctaagcccttccacctgctgaggatcattctttaggaaaagctgataggacgaggtctggctgggtgagaggactcccgactgccttctcatcctccgcttgtcttttctgtccacagtgggatgatttcatggaacttggcagaagtatccctgacacccaactggagcaggtcatcgagagccagaaggcgaatcaatgcgcagtgctcatctacacttcagggaccacaggcatacccaagggagtgatgctcagtcatgacaacgtacgccaaagtccctttgctctggagtggtggcctttgggctgtttctcttgttggcttccaggggcagggtggcattccagggtctagtacgcagtgtggctccttcaccattgggggttagagagtagcgtagttgcttcactagggggcagcagagtgcagtgattgagatcaaggaatgctggccatgtcaaaagcagaaaaatgtctggcagggtatgcacccagcagacaatgattcctctgtgtgagtcaggaaggttgtgtgtgtgtgtgtgtg[131 bp omitted]cagcctcccaggtagctgggattacaggcacccgccaccatgcctggctaatttttgtatgtttattagagacagggtttcaccaagttggccaggctggtcttgaactcctgacctcaggtgatccaccgccttggcctcccaaagtgctgggattacaggcatgagccaccacgcccagcctactttatttttcagttgtgtgtgtgttttgttttgttttgctttttgagaccgagtctggctctgtgccccaggctggagtacagtggcactccactcactgcaaccactgcctcctgggttcaagcaattctcgtgcctcagcctcctgagtatctgggactacaagccagtgccaccacatccaactaattttttgtattttgggtagagatggagtttcaccacgttgaccaggctggtctcaaactcctgacctcaagtgatctgcctgcctcggcctcccaaagtgttgggattacaggcgtgagccacagcacctggtctgtttttacactgtttttagagatgggttcttaccatgttgcccaggctggagtgcagtgactactcacaggcacaatcatcatgcacttaagcttcagactcaacaggctcaagtgatccttctgcctcagcctcccaagtagctgggtctacaggtgcatgcaatcacacctggcctgctggtttttaaatgaagaatttctataaaagcattcttataaatgcttccctgccccccctcagcctagggtaatagttaccagcacacactggtgtctgaccacctcagtgttggaatcctggctttgctacttgtaagtaaccatgtaagctggtgtgacattggtcatatgacatcaccaaactgtgtgtcagtttgcccaactgtaaaatggggagagtagagggcccaattctggcagagggcctggcccatggaaggtcagcaatggaagattgcaaaagtcagcctccactcccttaatacactgtctcagctagtgctgtatagcaaggtgtggagctaggatcatccccctgggtctggaggtcccgatcctagatccacaccctggaaatcttctctgaatttctcattttaacatgaatccaaatcttttgccaacactgtctccttcagcagaactcctttcctcctcctgcatcttagctcaaggcctcttagaagttttctgatttttctacaactatggtttttactctcccacactgtctgtctgagcaatatcacgggcccaggactaaggtctatatgtaaattaaaacttggcttcctgtaaaatttgatgcataaatatattttgctataacaacaaggaaagcaggcttcaagtttggcaataaatcacgggagtacaaattaaaagttcagacattacagaagcccttggactcaattgtatgatgcatgatagagaaaaattatttttggcccagtctccatcatcgctcccctggacctgtgtggttgcttccaccccatccggttacccgcctcccacccaactcccaccctcacccccacccccagtctatcctctctacagccaccagagagtgcctgtgagcacctgagtcaagtcccaatcctcctctgtctgcagccctccatggctcccacttccctccaggtaaaagcccaagtctcctgaggcccacaaggcactgcaagcctagccccatctcccttctcctctcctctcctccctctctcccccttgctcactctgttctagccacatggtcctccttgctgttcctccaacacaccagacacgtcctgcctcttggtctttgcatgagctccgtgggaagtatttttccacacagcttgttccctcccctccttcgggtgggtctctgctcagtgtcacttcctcagtgaagccctccctaacttccatgtttgaaatagcaaacaataaaccaccccattactacctaattcccatttggctactttttttcttccttagaaaattttgacactgtcatattatatgctcatttgtttatcaggaacatcagctccttgaggtcaggggttttctgtcttattcactactgtaactgcagtgcctgatgagcaggaggactcaatccacttttgggaaatgaatgaatgagggaaatctgattaaacaggatattcccctctatgctggctagtatttatgctcctagtggctgcatgtgtggtaagacattctcctagcacaggcattatgagcatagatcctggagcaagactgcccactttttaaaggggctggtttttttcttattaagttccttatagattctgaatattagtccttttttatttttattttttttgaaacagagtcttgctctgtcatccaggctggagtacagtgacactatcgcggcacactgcaatgtccacctcccaggtttaaacaattctcctgcctcagcctcccaagcagctgggattacaggcacccaccaccacacctggctaatttttgtatttttagaagaggtggggcttcgctatgttgggcaggctggtctcgaactcctgacttcaagtgatccacccacctcagcctcccaaagtgttggaattacaggcgtgagccatggcgcctggccaatattagtcctttaattgatgcacagttgcaaatattttctcctattctgtaggttgtctttactctgttaattgtttcttttgctgtgcagaagctcttaagtcccaattgtccatgtttggttttgttgtatttgtttttgtggtcttagtcataaattctctgcctagcccaatgtccagaagaatttttcctaggttttcttctagtttcttcattcttctgcacatggctagccagttttcccagcaccacttagtgaataggatgtccttccccattgtttatttttgttgactttgtcaaaaatcagttggttgtgtgtggcttaatttttgagttctctattctgttccattgatctctgtgcctatttttgtaccagtaccatgctgttttagttactatagccttgtagtataatttgaagtcagataatgtgatgcctctagctgtgttctttttgcttaggattgctctatttgggctttctggttccatataaattttagaattgttttatataattatgtgaaaaatcatattggtaatttgataggaattgtgatgaatctgtagattgctttgggcagtatggtcatgttaacaatgttgattcttcctgtcaatgagcatggaatgcttttccatttgtgtcatctgtgatttctttcatcaatgttttgaaaagttattctcgtagaagtctttcatctccttggttaaatgtgtctgtgggtattttattttttgtgtagctactgtaaatgggattgaattcttgatttggttttcaactttaagaatattggtatatagaaatgctactgatttttgtacattgattttgtatcctgaaactttattgaagtcatttatctaggagtgttttggaggaatctttagggttttctagatgtagaatcatatcattggtgaacagagataatttgacttcctctgttcctattttcctattcatacatcttttatttcttgcttgtgcctgattgctctggctaggacttctagtactatgttgaatagcagtggtgaaagtggatatccttgtcttgtttcagttcttagagggaatgcttccaacttttccccttcagtatgatgtttgctgcaggtttgtcatagacagctcttattattttggggtatattccttgatgcctagtttgttgagggttcttatcataaagaatgttggattttgtcaaatgctttttctgcagccattgagatgatcatatggcttttgattttaattctgtgtatgtgatgaatcacatttattgatttgtgtatgttgaaccatccttgcatcccaggaataaagcccacttaaaaagtatctttattttcatttgtttcaaagattgtttttattgcttctttaatttgtttacccaaaagtcattaaggagcaagttgcttagtttccatgtatttgtgtggttttgagggttcctcttggtattgatttctaattgtattccactgtggtctgagaagatgcttggtatgattttgatttttttaaatttattaagactttcattgtggcctagcatgtggttaatcttagagaacgttccatgtgcagatgagaaaaatgtatattcagaggccactgggtagagtattctgaagatgtctattaggtccatttggtcaactgtccaatttagtctagtatttctttattttctgcctcaatgttctgtctgtcagtggggtgttgaagtccctcacaattattgtatggctatctcttaagtctagtagtacttgtcttataaatctgggggctctgatgttgggagggtggttagatcttctggttgaatttaaccctttatcattatataatgcctttctttgtctttttttttttcttaactgtcattagtttacaatctgttttattggataaaacagtagcaccctctcatcttatttgttttctgtttgcatgatagatctttctccatccctttactttgagcctctgagtgtcattacatgtgagatgggtctcttgaaggcagcagcaggttgggtcttatttattattattttttatcaaatttgtcactctatgtcttttaagtgctgtatttaggatgtttatgttcaaggttaatattgatatgtgaggttttgttcctgtcatgtgtttttgctttgtattcttgattgtttagttgctttatagggtctgtgggctttgtgcttacatgtacttttatggtagcaagtattgttcttttgttctcatgtttagaactcctttgggcatttcttttcgggctgatctagtgatgacaaattcctttacatttgcttatctgagaaatattttatttcccatttatgaaacttagtttagtgggatataaaattattggctggcatttatttttctttaagaaggctaaaaatgggccctcaatctcttctggcttgtgaggtttctgctaagaaatccactgtacgtctgatggaatttcctttatatgtaatttggcccttttctctagatgcctttaagatttattttttttctacattgaccttggtctgatgactatatgcctcgggggtggccatattgtgtagcatctcacaggagttctctggatttctcatatctagatgttgacctctctggcaagattaggtaaattttcctgtattactccctcaaatatgttttccaagttgcttaatttttcttcttttctctcaggaatgcatttaagtcacaggtttggttgctttacataatcccacatttctcaaatactttgggttttttatttcttttttctttacttttgtctgagttgtttgaaagaccattcttcaagctctgaaattctttcttctgcttggtctagtctaactatatttttaaatttctatagtgaaattttcaattccagaagttcaatttggttttttcttaatatatctatgttgtatttcatatattgaagtgttcttctagtttccttatattggtttccaactttctcttggatctcattaagtttccttccaattcatattttgaattctttatatgtcatttcaaacatttcagtctgatgaggacccattgctagagaactggtgagattctttggaggtgttgaaacactctggctttttctactgccagatttcttgcactgattccttcttatctgagggagctgtcacttcttgtttttgaatcttctattgtttggatggggcttttgtattttttaattctagtttcccttgagggtatggctgtggtgtatgttgtgtgtgattgtatggccttgcttctgagtgcttttgggggccaaaggtctgtatgggttccacggttgtggacagcttctgtgcagtggctaaggtctgtacgggttccatggttgtggacagcttctgtgcagtggctaaggtctgtatgggttccatggttgtggacagcttctatgcagtggctttctcagatgctgcttgttgtaatgatgtaatggacataacagccaacactatctcctgcaggactgagggtgtggaggtctcaggaggcttatctcatgcactgtcaataaacccttccagtagcaagatttttgtttggtggtgcagtgcaggatgcagtccagtagatcgcacttaaaagttagaaccagcaggtaggctggtgccaagtaggcatgcataccctgatggaggtagcaggaagagatcatgatggggtgcactgaggtctcaggggtaggggcagggaatgcaccagctccttgtcctcagccagcaggaatgcagtccgcttctctatcacacccctgtcatggggctcacaatcttctgtttataaaggcttcatcctttagttcctggcagcagtgtggggtgggagggcaggtgggaaatgaccccttctccatgtcttttcccaggcatgggtgctgcccactccagtggtttgtgccacacccacatttcctttgtcccaaggggggctttggtgggctgcattctcctcctcctttaggggttacccatgccaagggttagatcttcagggatcctgcggccccccagaggctcactggtcccttgtgcttgccaaagtcacagcgcgttgtggggtatgtttgtggggaatctggtggtgcagtgggtcaagggcagagaatccccaggcagggcagtggcaccacaggtgcacaaccagtgtggtgcctgctgtctcagttcaggtctgaggggagtgtgggcatgcctgtgtgaactgaccacctggttctctgtccctgggaagttctctaatcagcaccgatggtgttggcctgggttgcaagggcagaggagctccctgagagtttagtgaccaggatattgtcaaaggcgagtgggaagcaaagaagcactcccacctatcctttccatggggctctgagttcctcaggagctgatctttgacaggcccttgcagctttcctttcctacgccgcagcttcttcctgtgggcactccaagaggtcctgcctctccttcctccattttcagttcaaaacttatccatttaccagtaattttgatcttcttcctgaaaactgacatctgatgtccgttgtcagccatcacgtatcaatacactgttagcaagtggcagattctcattcatatccttctggttccaaaccacaaggctttccacaatagggaagatgacacttgtcagccacgctgagcccaagccacagggctctgggcagggtcatgctgtctgtgggtagcttacaggaccaacatgaggacatcactcttgaactattttttttttttttttttgagacagagtctgctctgtcgctcaggttggagagcagtggcacaatctcgactcactgcaacctctgcctcccaatttcaagcgattcccccacctcagcctcctgagtagcagggattacagacgtgtgccaacacacccatctaatttttgtattattagtagagatggggtttcaccacgttggccaggctggtctcgaactcctgacctcaggtgatccacccgccttggcctcccaaagtgctgggactacaaacatgagccaccacgcttggccatcactcttgaacttcttaacctggtggctgactctcccaacagcaagtggtcccaaagatttgtcagtcccagaatttccacagcatcccttctgctcctttctgtcagtcaaaacaaatcactggaccaattctgtctcaaaggaaagagaaacaaattccacctcagaatgggaggagtagcagagaatctgcagctctgtttaatctaccacatatacataaaatgcttagaacaatgcctggcatacaggaagccatgtcaaggatagctattaatattgtatttggctgggtgcagtggcttatgtatgtaatcccagcactttgggaggccgagacaggaggattgcttgaagccaggattgtttgagagaaggctgggaaacacagcaagacctcatctctacaaaaatgttttaaaaattagctgggcatggtggcacatgcctgtagtcccagctactcgggaggctgaagtgagacgatcccttgagcccaggagttcgaggctgcagtgagctatgatgctgccactgcactccagcctgggtgacagagtgaggccctgtctcatcatcatctttacagcaagaagttaaaggtagccttagattcttgccagatgtctacagctcagtgtttctcccgtgtagggaacactatgttcagtgctaagataaacacattttaactccccactaaaaccccacgaggaaaattttgtcactaacccttttacagatgagaaaactgaggctcagacagaggaaattacttggtcaagatcacagagcaagggaagctctgaactgagatctgaaccaggagtgtctaaaccattgtacatcatagactatacacaacaagccccttctctcaacaagtgtgctaggttccttgaaccctggactgtgcatgacaaggtttatgggagccttcatcctgagcccagggaaagaagtggaactagccttgagggatattttgggctgactgctttatgtcctttactgcagttaaccattccttctatttcctcattcattcaagaaaaattcattgagcacctagtatgtactggggaatattccaggagcaggggaaacagcagcaaacaagacagactcaatctggaccttgggaacagataagaaatgaacaaatgaaaacattcagtttgtgtgacatggtacgtacagacttaggcagtcaatggcactttcaccttagatggtgtgagatggcccttctaaggaagtgacatttcagctgagacttaatgttcaagaagtagccagccatgggggtgggggacggtgagggaaaaggctgaagaaagagcattccaagcagggggaatagccagtccaaaggccctgaggctggaccatgcctgatgcattggagcaacagcgaggaggtctgggtggctggattaatgaagtaactattcaccagagatttatgacactagtgagaaatataagtgacaaaattataggtacactaaaactttacatctacatatgcattggagaaagaaaaatgctaataatgctaattactggggtgtttatatgatgggattatgggtagcctttttgtttgtttgaccatgttggttccatagttctatattggacctgagaagcctctgtccccactttaaagaagaggcaataaaagccacgagggattttaaggaaatagcccaaatgtctagcaaacagtggagtcagggtttgactctgggacacttgctgaatccagttttctgagttctgtcgttggacccaaggaagtctgcaacctccctactcctaaagctgcctgctaaattttgcaactcctcctaacttcaggcaagttagttaaggactctgtgcttctgttttcacataattctccctgattaaaaaaaccgttagacctagggctttacccaaaaaaatctgtcgaatgattaacaaccatctactcacctgggctacccaagaggctgaagtgggggccccaggtccttactcgatcttaccttgagagcatctgcttgagcaaagtatgtgagcgccccaatctttatgggtacccagatgtccatcatctgtgctgcaatatggctgagtgggaggtagctgaccaccatctcatgcttgtctgtcagttgaaagtcctttgccactgctcctgccatccacgtgatctgtaacataagggacaatccaaggtgccttatactgacttatgaaaaaacaacacacacacacacacgcactcagccagactgcagcacagacaatggacatctgggtacccataaagatcggggcactcacatactttaggcttaagcacatgctctcaaggtaagatcgaataaggacctagggcccccacttcatcctcttgggcagcccagatgagtagatggttgttaatcattcgacagattttttgggtgaagctccaaaaattttgggagaattatagttaccaacccccaggtgttatgatgattaaatgacttggtgtttgtaaagtatgaagacagtgtcttggtcatagtaggtgctttataagtgtttacttaattagtttatttatttagctaaatacatttaaaatcgccctccaggctgggcatggtcgctcacatctgtaaacctagcactttgggaggctgaggcgggaggtcgctggaggccaggagtttgaggccaagctggaaaacatagtgagaccccctctctacaaaaaaagttaaaaaaaaattagctgggtgtggtggtgtgtgcctatagtaccagttactcaggaggctgagatgggaagattccttgaacccaggagtttgaggctgcagtgagctgtgatcacaccactgcactccagtctgggtgagccctgtctgaaaaataaataaaaatttaaaaataaaatggcccttctatgagggtgaggcaccttggattgtcccttatgttacagatcacgtggattgcaggagcagtgacaaaggactttaaactgacagacaagcatgagacggtggttagctacctcccactcagccatattgcagcacagatgatggacatctgggtacccataaagattggggcgctcacatactttgctcaagcagatgctctcaaggtaagattgagtaaggacctggggctccgacttcatcctcttgggcagcccaggtgagtagatggttgttaatcattcgacagattttttgggtgaagccccatgtctaacggttttatctctgccctcatcttaatgctctatttagaagcattaaaaacaagaccaggcacagtggctcaatctgtaatcccggcactctgggaggccaagacgggcagattgcttgagctcaggagttgagaccagcctgagcaagatggcgaaaccctatctctacaaaaaccaataataatagtaaatttttctaaaaaacaaaaaacacctgaccaaataaaacaacttttttttttttttaaccagctggctacattctcctagtttttatctttatccaagtcagggcatccatgtatggttatgtagattgaacactgaacaacccaagacaaagatgtacttggtactgaaagtaaagagtgtgtgtgtgtgtgtgtgtgtgtgtgtgtgtgtgtgtgtttataagtcagtattcccaaatctaaaaagctccaaaaaacaggagtttttggcagcaaagtctgatctgaattgataagatgttgtttgtggtcttcattttattccacttactgggattatgcatatatttgtagaatttttataccaccttttcttgacttataccctttaagtattatcttttgcctttctattgtggtgaggatttagctcccttcctctcccgtcttctcatttctccttccccattctctcaacataaattattcttagttaactgagccaagtagtttatcatatgattccacttcctgcttggtacaactttttgtttttcccagaattaagttgcctttcttttccagtttggtgaagtttttgcatacatgtccagttgctccatctgatctgtcacatgcttatcaatagtctccaaatgttcaaatattcattgcattattattattattattattatttgagatagagtcttgctctgttgcccaggctggagttacagtgccatgatctcggcccactgcaacctctgtcttccgggttcaagcaattctcgtgccttagcctcccaagtagctggaactgcaggcctgtgccaccatgcctggctgatttttgtatttttagtagagatggggtttcacaattttggccagactggtctcaaactcctgacctcaggtgagccttggcctcccaaagtgctgggattacaggcatgagccactgcacccagctccattgcattatttttttcctccatccttttgcacttagctggactgttgttttaggttgtcttaggttgggtaccctagaagcaaaatctgagttggagatctttgtgatttatcaatggggagctctcaggtgaaaaccaaaaggaagtgaggagagaaggataggctgggggaaaaaacaagaaaggacacacattcagctggattgtaacttcagactgatcccataggaagctctgaggcatgaacgacaccagagttgttccactttgaggcaaggaggctgtgcttttgtaaccccaactcagatagtcattggctgtgggctcaggcatccatgtgggatagggagcataacttcccagttatttctaagtaagggcggttttctggaaaagagggaactgtgggccactagagatctgataggacatcaacagcatcttctacaagctgccatacagggatatccctttttcccactcctgggttggatcccctattttctggggtctttgccttcttttttggattattccttgatttagctggatatcattcattggtaggttttgcaaagtagttatgtgaaagaacactttgatttcttttctaaatttttttttttttttttttttttagagacaaggtcgtgctctgttacccagcctggaatgcagtggcatgatcatagcttactgcagccttaaattcctgggctcaaaggatcctcccacctcagcctcccctgtagccagaactacaggcatgtgccaccatgcctgactaatttgttttacagtgattttctacatgtctagactttgcaaacggagccagaaaagaactctgacattttccccaagttacattctctgaattagtttcctgttaatgccacaacaaatgaacagaaacttagtgacttaaaacaatatttatttatttatttagaaatggagtctcgttctgtcacccaggctggagtgcagtggcagtggcatgatctcaactcactgcaacctccacctccgggttaaacgattctcatgtctcagtctcccaagccgggattacaggcgtgcaccaccacgcccagctaatttttgtatttttagtagagacgggatttcaccatgttggcaaggctggtcctgaactcttgaactcaagtgatctgcttgcctcagcctcccaaaatgctgggattacaggcataagcaagcgcgcctggtccatttattatcttatagttctggtggtcagaagtttgaaaatggtctcactgggctaaaatcaatatgtcatcagggctgcattccttctagaggctcttggggaccttttccagcttctagaggccacctatgttccttatctcagggccccttcctccatcttcacagccagcagtgcagcctcttcccctctcctgcttccctcttataaggaccctgtgatgacattgggccacccagatcatccaggatgatctcccatctcaagattcttaacttaatcccatctacaaagtcccttttgccatgaaagattacatattcacaggtcccaggagttagaacgtggacatctttagggggccattattttgcctcccacactctccatcaagcaggctaaatcttagggcctttgcacgtgcttctagaaggttctttctcttgttctttgcagggctgactcttctttgtcacttagctctctgctaaatatttccttggcccctctcaatccctctcatatgccccatgctcagtgcctgagatgtgttaggtcttcaatacatatttcctttcttggctgaatacataatacatacacatttacctacaggacctgagaagttcccattttcccacatccttaccaactcctaatattgtcaaaatgtttacaacttgtcaatctgaatagtgacaaaagtgtcttaatattttcagaaatttccagattgttttctgaagtacgtgcaccagaaatgtgcgaaggttacagtttctctacatcttcactaacgcatgttactatctgttttattattattattgccattctaatttgcatttccttggtgattaatgatagtgagcatctcttcatgtgtttattgaccatttacatatcttctttggaaaaagaaatctgttcaaatagtttgcccatataaaaatgtggttgctctttctgtgctagcatgactagtaaaaagaaaagtaaaagccaggcacggcggctcacgcctgtaatcccagtactttgggaggccaaggcaggcagattgcttaaggtcaagagtttaagaccagcctggccaacatggtgaaactccgtctcctccgtctctactaaaaaaaaaaaaaaaaaagaaaaagaaaaattagccaggcgtggtggtgtgcacctgtaagcccagctactcaggaggctgagacaggagaatagctcaaacctgggaggcaaaggctgcagtgagccgagatggtaccactggactccaaccggggcaacagagggagactgtgtcaaaaaaaaaaaaaaaaaaaggaaaggaaaggaaggcaagggaagagaagggaggggaagggaggggaggggaggggagaaagaaggaaagaaaggaaggagggaggaaaaaagaggaaggaaggaaggaagaaagaaaaagaaagaaaggagaaaggaaaaaaattaaaaatgaaaaaaattggttgcatatctaatctcattgttgagtgttaagggttctttatatattctggttacaaatcctttaccaaatttgtggtttgcaaatactttctcccagttctatggcttgttgtttcctcaataatcttttgaagaggaaaaagtgtttaagttggatgaagtttgatttatctattttcttttatgcttttggtatcatatctaggaaatctttgcctactctaaagtcacagggattttcttctacgttttcttccaaaaggtttttagtttgagctcttacatttagggctataatgcattttgaggtaattttcatgtttggtgagaaataaggctctaaccctaaattttgtggaagcgtttgtttgttttattttgttttgcatttgaatagtccccacccgcccccccccccaacgaaatttccttggcattttgttgaaaatcaactgagcataaatttaaggttttatttctggatcttctattttgttccactgatctgcatctctgtctttacgccaaagcctcactgacttattacactagcttgatagcaggatggctaacgtttcctggtttgcctgggacttccccagttttaaaacagaaagtttcacatttcagatattcctgcagttctgggtaaaccaggacggttgttcaccctactttagaataaattttaaaatcaggtagtaagtcctccaattttgtctttcttttccaaaattgcttgggctattctaggtcctctgcatttctatataaattttaaagtcagcttgtcaatttgtatttaaaaaaaaaaaaacttgcctagatttcgataggggttgcattgaacctataggtctctttgggggagaatcttgcatccttttttaacagttgtgtaatattccactgcatgcttggaccacagtttctttagccaaccctttgtcattgaacctgtaagctgtttccattctgttacaaaacagtgttgcaaagaacgtcttgaacgtgtttctttgtgtgcctgagtctttccttcagctgaattccttcacccacagaagtgaagttgacaggttgcacttaaaatgttaatagaactgtcatgttaccttccaaaaatattttaccagtttatgcctctcatcaaatccctagacagagtgcaaaaatctgactggccaacccagctaatgggttgtctccttttggttgggagtcctgcgtaatctgatcagtgaaggaatgttctcttgggcaaagttgggtggatcaggagagatggacatccctggtgcacggaaggccctgctgtggctaacctagcttcgttccatacagggcaccttggtaagtactctaaaggaggtaaaacctactgtcttcattggagtgcctcaaatttgggagaagatacatgagatggtgaagaaaaatagtgccaagtccatgggcttgaagaagaaggcattcgtgtgggcaagaaacattggcttcaaggtcaactcaaaaaagatgttggggtaggtggagcatccagagggctgggagggtagttggtgaggaggctcagccttctccagtgggtcccatcagcccttctccacttgacggcattcttattcacaggaaatataatactcccgtgagctaccgcatggctaagactctcgtgttcagcaaagtcaagacatcccttggcttggatcactgtcactcttttatcagtgggactgcgcccctcaaccaagagactgccgagttctttctaagcttggacatacctataggcgagttgtatgggttgagtgagagctcgggaccccacacgatatccaaccagaataactacaggcttctaaggtaccagcccccggggcagacccctgctcctcccataacatggggtcaagagggggaaggtgggtggatagatgggcctctgggttaagaggaatcctgacgtggtgtctccagaatgatcctgttctccagcctccaagtcctaactccgcatgaccgtgggaaaccctggatggtaagagagcccacagataagggggatggctctctgaacattccatggtctccccgtttgtcacttgtgagttctgccttcaaggtcaccgcctgtgacctcagcacctttcatccccatgatcctccatctcaaaacacctccatggccgattcctggctttctcccaagctcagcttgccctaggctgcaaggttgaacccaatgataagaaaactttaagaataccaaattgaggttcaactccccatctgagagctgtcagtcatagaatcttctggttgtgtctctccctgactccctccttttagcatgggtgaggtttgaaaaaatcttttcatacatgtgtttatttattaaattttaattagagatagggtctcactttgttgcccaggctggagtgcaatggtacaatcatagatcactgtaaccttgaacttctggattcaagcattcctcctgcctcagcctcccaactagctaggactacacgcatgagcctccatgcttggcaattctgtaaaagtttttttgtagagatggggtcttgccatgttgcctaggctggccttgaattcctggactcaagcaatcctcagcctcccaaagcgctgggattacaggcatgaaccaccatgcccagcattgccatacatttaaaagtcatttgtacttcctttcctatgagctgtctgtccatattatctgcctgttttaaaaattagattattggtccctttattattggtttgttggcactctttacatattaggaaaatcagccctttgtctttcatatgagttacaaatattttatcccctggcttgtcattggtattttgattttagttaagatgttttttactgtgcagaaatttgtggtcacaaatttagatggttgaacttatcgatctcttatggcttctggatttttctatatacctaaaaaggcttcagtgggggaaatcataaggcagctctttgtaagttttaaatttctcaggtctgtcttcattttttcttttgctaaccaggggaatacctacatttaaccctgggaccattggccttgctaactgttaatcaaagagatctcagcaacacacggagaaaatatttcctttcctgcatcctagaactgcactggccagtgctatctctaggaaaaaaaaaaaaaaagacaaagaacccagatttcaaatagtgctactctgttttatgaaagtaacttttacctctaaagagattgtagttggttgccgtacttaaaattagctgtcctaatcactgcagagaggtctacctgttttctttaaaatgagggttttgttcctatctttaagccaaaggcatttttttctttgccggcatatgtggagatgaaaaaaaaaaaaaaaaaaaaaaaaaaaaaaaaaaaaaaaacgaaaaacagcctgcaatgctgctggattttctttcattttttgtttttgtttttgtttttgttttttgagacagagtcttgctctgtcgcccaggctggagtacagtggcgtgatcactactcactgcagccttgacctcctgggctcaggtgattctcccacctcagcctcccaagtagctgggaccacaggtatgtaccaccatgcccaacttttattttttattatttttgtagagacggggtctccgtatgttgcccaggttggtcttggaactcctgggctcgagcaatattccctcctcggctttccaaagtgttaagattacaggtgtgagccaccacacctggccactgctaggtttcccagttcacaaagcctttgggaatctgacacgctggattaaacactgcagcaaacacctccttctgtgcgctggggtgcatatccagcctgctctagctgagcagagtattaggcacctaggctgaagatccaggcagagctgggtggctgactttgtccctatgagcctgtttctctgcttctgtcccctggcagctgtggcaagatcttgactgggtgtaagaatatgctgttccagcagaacaaggatggcattggggagatctgcctctggggtaggcacatcttcatgggctatctggaaagtgagactgaaactacagaggccatcgatgatgaaggctggctacactctggggatctgggccagctggacggtctgggtttcctctatgtcaccggccacatcaaaggtaccaggggctgagctctttgggaatctcctgcaagcaggcccaccctgaacatttaagggcccagggtaccagcacgaaggccacccccagttcctcaccttccaagaggagctgtgcagaaactcctcagtctgtacaacccagctctatcctcctgtccagcaaacagttaccccttggtcacttggtatcccgtggtccaccctcaggaggatggacctgcaaaagacaagccttggaacctcctgaagcccctttcagaatagcaccagcccagaggaaaactcagtaagagaaggataaagaaattccttgtgacatcattttggcacctggatccagccatatctgaaagccaaagaccttttgaacttttcagttatattgagccaacagttttacttttttttttttttaactcaaactcattcaagctggttcaaatgggcttgagtaaaaaagtgccatcttctcctgcattttaagaggataataatcgacagagttgtaaggattgaagaaagtatagaacaaggataagccaacttttcctgaagagggccctttagtaaatatttttgggttcacaaaacatgtgtctctgttgtagcttctcaactctgtgatttgtagcacaaaaacagctgttgacaacacataaagaatgggtgtggccagctgccaatatgaatatcataatttttatgtgtcaaaaaaaattcttcttttgacttccaacaacttaaaaatgtaaaattcatttttagcttttggttatacaaaattgaatagtggcctggatttggccactatgggccatagtttgccaaaatctgatggagaacacttagtgcttttttactcaaacccatttaagatgggtttaaataggtttgaggaaaaaaataaaaagcaaaactgttgactcaacgtaactgaaaaggtcagttggccaaaaggtcagctggcttcaggcatggctggatctgggtgccaaaatgaggtcataaggaattttaaaattcttttcttgagttttcctctgtgctggtactattttatttttcagagaaggtctcgctctgttggccaggctggaatgcagtggtccaattatgactcactgtggcctcaacttcccaggctcaggtgattctcccacctcagcctcctgagtaactaggactacaggcgtgtgccaccacacccggctatttttttgcagagacccaatttcactgtgttgcccaggttggtctagcacttgtgggctcaagtgatctgcccacctcagcctcccaaagtggcaggattacaggtgtgagccactgtgcctggccactaggtttttttttttttttttttgagatggtgtttcactcttgttgcccaggttggagtgcggtggcatgatctcagctcactgcaacctccgcctcccaggttcaagtgattctcctgcctcaacctcccgagtagctgggattacaggtgcacaccaccaaacctggctaatttttgtatatttagtagagacggggtttcaccatgttggccaggctggtctcaaactgggggttccacgttgtcatggctggacatgtaccaagccaagctctgttccagaaatccttatcactgctggtggtgaaaatgtgccccccattcctgttgagaccttggttaagaagaagatccccatcatcagtaacgccatgttagtaggagataaactgaagtttctgagcatgttgctgacgctgaaggtaacatgggtttgctgtcattgggggaagtctctgcagccggtcttgggttccctggccccaccccagggtcaagaggatgcatctgtgggttcaagacccacttcttggtctgtgggcctggggaggggtgctggtcaaggagcatgggtggtgacagaggtgtctgggggcagtgtgagatgaatcagatgagcggagaacctctggacaagctgaacttcgaggccatcaacttctgtcggggtctgggcagccaggcatccaccgtgactgagattgtgaagcagcaagaccccctggtctacaaggccatccagcaaggcatcaatgctgtgaaccaggaagccatgaacaatgcacagaggattgaaaagtgggtcatcttggagaaggacttttccatctatggtggagagctaggtgagtggccatgacatttggaggctggtcccttgttagcatctgggactgtgtgggctctgaagagacaggtccttttctgaaggtcagagggtctatgaaaccagccagggaccaggagagggaggctgccaccttcagctaactggtccccagctcctcatcttggaaataaaatccaacctccttactatagctctatacaatctctcgcctgctgacctttcattcactctgcaccaactctatgggctttcttgatgttcctgcagctctctgggctttgtccaactatagggcctttgcacctgccagtctgcctccctgggaatacccttccccctcaattccttgcctggatggcttcttctcattgtccaggtctcaccctacaggcctcttccccctcagagcagccttgttacaggacccccaggtttgtatgcccactgcacagtaatataccaatacactgagacagcaggggatgcagcaaagacagagtttaattatggccaggcacagtggctcacgcctgtaatcccaacactttgggaggctgagttgggcagactgcttgagcccaggagtttgagaccaacctgggcaacatggtgaaatcctaactctacacaaaatacaaaaattagctgggtatggtagcggtgcccagctactcaggagactgagaggatcgcttgagcccagggaggtcaaggctgcagtgagccacaatcatgccagtgcactccagcctaggcaatgcagtgagaccctgtctcaaaaacaaaaaacaaacaaacaaaaataaaaaaggaaattaaattcccttgcagggaagccaaccgagatggaaggaaccctcaaatctctctttgaggaattctgggctggggttttaaggggatctttgggggtgaagggctggaaaattagagtcattgattggttgaggtaaaggggatgaaatcatcggatgtggaagctgcattctttggtaagtcagctcccgtggggtccttcagatcagtgggcatcagtagtttcactggtatgcaggacttgaaaggatatctcagatggaaaacttgacctttcacaatgcttaatatgttatctgtagagcagttaaggggaactatatcttgtgattgggttttttgtgtgtgtgtgattctggggcaataggcaaacagctagctatgaggaaggggttagagagcaaactgacctaatgatgaatgttgagtgtgctgtaagtgtggctgattttagtttgtccccctcccttcttctctgattaatattataaagttttcagggatggtttcagccctccctgaccatgctggctaaagtggcttgccatcgtccttaatatttcacccagtagcttgctgccacccccattataccaccctgtcttctttaaagcatcagaacatgaaattagtctctgtatgttttatttttgcctctcttcccccatgagggaagggctcactccagagtggggatactggattctactaatgtactttcatttgcgagtttgctgtcagcgctcggctgtaatctgacggtgtggatggaagaatcagagcaagtatgtggcaatgaacaacctgggttcaaatcctgtcccctctacacagggaagtgacttgtcccactgagtcttgttttttttttgtttgttttgagacagagtcttgctctgttacccaggttggagtacgatggcacaatcacagcttgctgctgcagccttgaactcccaggctcaagcgatcctcccacctcagcctcctgagtagctgggatgagtgcgcgccaccatgcgtggctattttctttctttctttctttcttttttttttttgagacggagttttactctgtcgccaggctggagtgcagtggcgcaatctcggctcactgcaacctccacttcccaggttcaagcgattttcctgcctcagcctcccgagtagctgggactacaggtgcgtgccaccacgtccagctaattttttgtatttttagtagagacagggtttcacc[139 bp omitted]ttgtccaggctggtggtcttctcatctataagttgaaaacacagtccttgtggggttgcttgagacacccagaggggcttcaatgcccctggtgactcagaggctttcaatgaaagtcctgggctcagggagcagacaactcccagtttgagacttgattctgccgtgcacttgctggctgacctcagaggaactggtcctctctatgccccagtttcctcacctgtaaaatggggataggggtatggtttgagatgatgatatccctcctccattgggtgcacagtccacatcaggcacagaatgcaccatgctcttcaccttccagctcacagaatcctcaccacagctgaaggatcacatggaagttttatcatccccatacagatggcaaaagttacacaccctgaaagtcaatggcacagccagccacccagcctagccccaggcatgggactctgttgcctggtcatgcatgggtgtgtgtaattttcttttatctccacaactcaattgatttctcctttctcgataggtccaatgatgaaacttaagagacattttgtagcccagaaatacaaaaaacaaattgatcacatgtaccactgactgctttgatggagctgctctcagctgttctgatggtgagattcagttgcttggctttgctgggctatgcattcagagtccaagagagggctccactgtgtggcaggcagatctgtgactggaactgcagaaaacacacacatacacacatacatacacacacacacacacacacacacacacacacacacacactcttagttgcagtggattctgagtagcaggcttcaactcatgctgtctctactctaccagggtcatggtagggtgtgtaaactccttcagctggccaccaatgttgttagctgtgcttcctgccttttctatttgtttctagaaagtaggaggcaatgaatcccaaatgtctcattgggtcttatttggagaaggcctttgtcagaaactttagtggagaaagttctacttgccaggaactcaaggaatgaggtgtgttggcccattacacagataataagggatggaggcttgaacttccactatccaccgtttatcctctcttttccccaagacatgtgcagagggagcctccatgacaccatgaatcactgatagttattgaggtgttttttttttttttcttcactagatgcacagtgcaggcagaaagtagaatgcatcttcaattgtcctataggctgcctgtaaccttttcatgggcaacttgttctaatgccaccagccaacccatgttttagtttgctggggctacattacaaagtaccacagactggagggcttaaacaacataaacttattgtctcacagatctggaggctaaaagtgtgagattgagaggctggctggcttggttccttctgagggctgtgaggggaggatccattccagacttctctccttggcttgctgatggctgtcttctctctctgtcttcacatcatcttccctctgggtgtcactgtgttcaaatttcccttttatagggacaggttagtaagattagggcccacccttatgacctcgttttaacttctataatgatctagtttccaaataagttacaccctgaagtactaaaggttaggacttcaacatgtgaattgtggagggatacaactcagcttgtaactcatcatatccattgtcctttgttcaacgttaactggtttaacccttccacaccttcatttgttgatgtcttgtgggtgggcccagcagttcaacgtaccacattcataattcttcatctttcacaagatttccaatttcactttccagttgaatgagaaaccattggacattgatgtgggagtgagagatggaccctcttacaccagtgctgtccaatatggcagccactggccactatgtggtctgtccaaaccaagatgtgctgtaatacataaaacacactgggcttcaaaagcacagcaccaaaaaaaaaaaaaaaaaaaaaaaaatagaatatacaatatctcatcagtattttaaaattttgattacatgttgagatgatattttggaataccgggttacgtaaaatatttattattaaaagtaattttaccagttttaaatttttatttactttttagagacagggtcttgctctgttgctcaggctagagtgcagtggtgcattcatacctaatgttttaaatgtttttgtagagatgaggtatttctatgttgcccaggttggtctcaaactcctggcctcaagcgatcctcctgcttcagcttcacaaagtgctgtgattacaagtgtgagccactgtgcctggccaagttccttttttaaaaatgtagctgctatacattgttaaattgcataggtggctccagtaatgtttcttgtggatagtgccactctaaagttcattgtggggagattttgggtgacagccaatttataaatggatcgattcactcgggaatattttcatcatatggtgactgtgggatcttggagactgaatgcacatattacgagaatccccatgtgataacttgtgtttctcctctttgcagccttcagcaggaagacctcattgcaataagtgaaatgctgctctaggtagaagctctccctgctgtttttaagaagccacattcctcattggtcagtttcttgattgttcgtctgttggagaggtgctccctagaagaacctgccatacgtttcaaagcaataaaatcactgtatatctttctaaggaccttcaagtcatgactccagggaagcctattgggaagtctactaaaaactgcctgatttacaagaaagacctgaacttgtgggctcccatttgatttttttctcctcaggggactcagacattagaaagaaaaagcctcacagatttgaagaactggacccccaaatcaactcacctgcctggaagcaactgggaaacccttccaataagtcctgataataaagcacttcagggtcccatgtcttgatttttggcttgatagaaatactttgtcctttatttagtgtgatggggagggcttggactctgaaatcagttctgggttcaaattgtgaccagctgtgatttcaactgtctgaggctcggagattttaaacctggaaagtagatccccatctcggagggtggccatggaagttcatggagatgatgtacagggaatgcagtatctaactccagaaagtcctcggtttgagttaatggttatcatcaacacagtcactcttggttaactcaagagtcaaggtatgactcttgactaattccgtcattagggaggagttttctgttgtagtaagttaagtaaacttaaagaagatagtttattcctctcccatccaacagtcatattataagcagaccagagctgataaagcatattcatagtgtgtctccgaaatattagtagggagagtgggagagggaacatctcccagcctggacagaaacagcatatcaggagcaacaaaactcccagtgtctcttaagcttctagatactcagaggcaggccagagacccttttgagttccattttttaaatacaccagaaatttaaaatgacattctccttgcaaaaaaaaaaaattaatgcaatgccgataaggctaatgtcatatttgattgctgtactaggccattattgcactgttataaagaaatacctgagatggggtcatttataaagaaaagaggtttaattaattagctcatggttctacaggctttatagaaagtatggtgctggtgcctgttcagcttctggtgaagcctcagggagctcacaatcatagcggagggcaaaaggggagcaggcatgtcgcatggcgaaagcagttgcaagccagagggagtgccacacatttttaaatgaccagatcttttgagaacacactatcgtgaagacagccccaagccatgagggatccgcccccctgccatgacccaaacacctccaccaggccccacctccagcacaggggattacagtgcaacatgagatttgggcagggacaaatatccaaaccacatcaatggccctcctcaactatttggcgggcttttactttttaatgagttagtacagttggtcctcactatctgccaattccatatttgcaaatttgcctcatcgctagaatttgcttgtaaaccccaaatcaatagttatggcactttagaggtcattccaggacatacacaggagtgaaaaatttgagtggccaactgtacattcccagctgaggttgaacaaggcaacactctggcttcctgtttcagctctcacactgtaaacagtgccctttctgaggtatatctcatgccacattttctgcattttcatgtttctgttagtaaacctttttgagttttttaaaaatagagacagggcctcactctgtcacccaggctggagtgcactggtgtgatctcagctcactgtaacttcaaattcctgggctcaagggatcctctcctgtcttggcctcccaaagcactggggttacaggtatgagccactgaactcagccaaacccttctaattttatccatgactacactgtacaatttttggtcaatataattctattttatagtttttgtttctactgtccatgtgatctccccacttgtaggttttctaggtagttaatgttggtatatggaagtgctgttgatttttgtatgttaatattatatctagacacctcactgctaacctatttctcaaaatgtgtaagctttttacagagatgtgcatatcttttgcaaatatttttttacttccttttcaatattgattcctcatcaaggaaatacaaatggttgatcatgtcaagtgagggaagctcgaatacaggagaggaatgtatgtattttctataatgattctcaccctggtctcactgttctcttaatgttctctcaatgttttttgagaaacgacaagaatctactaatgtcaggaaggcttttaaaatttaactgtggtaaaatatatgtaacataaaatgtgtcattttaacccttttttagtacacagttcggtggcattaagcacattcacattgttgtacaaccatcaacacgacgcatttctagaagtttcatctcttcaaactgaaactttatatccatcaaacaattccccatttccccttcccctgaaagctatcattctattttctgtctcttgaattttactactttaagcaccttaaaagtgaaattgtcggccgggcatggtggctcatgcctgtaatcccagcactctgagaagccgaggcgggtggatcatgaggtcaggagttcgagaccagcccagccaatacggcgaaaccccgtctctacaaaaaatacaaaaattagctgggcgtggtggtgcatgcctgtagtcccagctgctcaggaggctgaggcagaacaatcacttgaacctgggaggtggaggttgcagtgagctgagatcatgccactgcactccagcctcgggaacagagcaagactccatctcaaaaaaaaaaaaaaaaagtgataatgtaagaatatttgccattttctgactggcttatttaactgaggataatgtcttcaagggtcatccttttttaaagttttttcaatttttttaacaattttttaaaaatagagacagggtctccctatgttgcccaggctggtcttgaactcctggcctcaactgatcctcccatctcagcccctcaaagtgttgggatcacaggtgtgagccaccacacctggcctcatccatgtttagcatgtgttaaaatttcttttttcaggctgaatatttcatcatgtatgtacacatgtgtgtgtgtgtatgtacacatatatacgtggataaatttatccattcatccatcaatagacacttgggttgcttccaccttttggctcttgtgaatcatgcttctatgtatatgggtccatggcatggttcagggtccatggcaaaaacgcactcaacgcccagaaaagaaaccatgggtgtataaatatctcttcacgcccctgctttcaattatgcttggtgggcaaatgaattcataaacccccaggcacagtgactcaaagtccttctctaactcaaccttctgggagcccagggctctgcttccttgacctcgatgatgcccacaccttatttacctcctccatctcaccactcttcttccagctcccttgggaactctctcactcaacctcaacaatgtagaacagtgactctggaatccctcctgctgccagacttgcccctggctcctccctggggactgtcaccttgcagaccactggcttgtcagggcagtgaagggccttcttgggtagaccctccctgcccgctaaaactggcctctacaaagaggcaatgggccatgtccccatcatggctctgggccacgggatacacagtgatggcaccaggctggccatggacaggaacattctggatgtctggtctagggaccactgtccccctgtggctagaacggggggagtgatcaagctgataaaaaggtagagtccagaggccgggcatggtggctcatgcctttaatcccagcactttaggaggctgaggtgggtggatcacgaggtcaggaggttgagaccatcctggctaacacggtgaaaccctgtctctactaaaaatacaaaaaattagccgggcatggtggcgggcgcttgtagtcccagctacttgggaggctgagg[132 bp omitted]tggctcatgcctgtaatcccagcactttgggaggctgaggcgggtggatcacgaggtcaggaggttgacaccatcctggctaacacagtgaaaccccatctctactaaaaatacaaaaaattagccgggcatggtggcgggcgcctgtagtcccagctactcgggaggctgaggcaggagaatggagtgaacccg[149 bp omitted]tgaaaatatgttgtggatgggagggagggactgggagcccacatacctcagctcctcctggggatgaactaggctgcacaccaggtggggaatgtgtgtggtaggttcatttccttctatgctcctccttctcttcactccagcccccaacccccccctttttttttttttttttttttttttttttttggagacagagtctccctctgttccccaggctggagtacagaggtgcgatctctgttcactgcaacctccacctcccaggctgaaatgattctcctgcctcagcctcccgagtagctgggattacaggtgcccgacacgatgcctggctaatttttgtatttttagtagagatggggtttcaccacgttggccaggcctcaagtgatccgcccaccttggcctcccaaagtgctgagattacaggcatgagccaccgcacccagcctgttatctctctttttttttttttttttttgagatggagtctcactatgtcacccaggctggagtacagtgccgcgatctcggctcactgcaacctccgcctcctgggttcaagcaattctcctgcttcagcctccagagtagctgggactccaagtgcgcgccaccacgcccggctaatttttgcattttttagtagagacggttt[132 bp omitted]cctcctttgcctggtcagtgtctacccattgttcagagaagccttccctggccacccccataactcggtgggaatcctgtgcctccctgctggaccctcccacccctgctgcccactgtaatttcgtttgaagatctgtctgcccaagcccagcaaactagatgcccccagacagtgacaaggaaaacaaagatactttgaagaccatgtcctcggacagattcagagtccacgacagaaaggcactcaacacccaggaaagaaaaacagagtttggggctccttggctcctgggtgagggtagtggtgttcccagagaagccagtttgagagtggggatctagcgcttcagggctggccaaggccgttcagccagtgttgggatcctttagggttcaatctatctcttcagaagttgcctgatgggatgcgggcatggagagcaccaccatagggtgcccggctgggtgtatgggggtttgggggtgcagg[132 bp omitted]tgaaaccccgtctctactaaaaatacaaaattagctgggtgtgggggcgcatgcctgtaatcccaggtacttgggaggctgaggcagaagaatcgcttaaacccaggaggcagagttcgcagtgagctgagatcatgccattgcactccagcctgagaaacaagagtgaaactccatctcaaaaaagaaaaaaaaaaaaaaaaagaagtgtctggtccctggggaggagacggcgcccggcagggacagtgggcctacagctgacctgtctgcttgctggtgggtttcctgctgaactcctctctgggtcagtgcgtctcactgtccacctgtccctgcatccccttctgtgcctcgctggtcatctttctcccttggcaatccacttcatacaccacgcctcctccgtctgccatctctcagtgccacgctcctgcctgtgctcccatctctccctggttttgcccctgacacgccacctgctcgcctctctctaggtccatctgggggtctccggccgccgctgacccgcctgtccgcaggctgagctactcggaccacggagcgcgacggggaggcgcgactgcggctcagcaaggactaagttagcaacaagacactcctcactgtgcacgacatggtcgcgagcacggccatcaagtacgccaacaacatcgcgcccggctccaacagctgccacctgctcacctacatcgagtaccaccagcagtgtctcggcgtcgagaagtctttcttcaaagtaccgccaggcggtccgcgcctgcgcgcccctcccgcccctcctgcgcctgcgcgcctcttctgcacccaccctcttgcgcctgcgcgccacttatttcacctcctgcgccagcgcagcgctccagggcctttcttcccccgcccctccccgcgtcctgcgcctgcgcgcctttcttcccccggtaagcctgcgcgccgctccggcccacttgcttctgcgcctgcgcgccgctgcagggccttcctcccccatctccccccgcctcctacgcctgcgcgccactacatcccttctgcgcctgcgcagtgttactctcctgtgactgccacttgtctgactcgcatgtttgttttaacggattccctgaggctgcctgagagccagaaatgaaaagctgcagacttaggggccctggttcagatcccagagcagccattagctacgttttcttgcacgaaaactttgtgcctttgtgcctctgtttccctatatgaaaactttacatataaatatatatatatatataaaggccaggcgcggtggctcacgccttaatcctagcactttgggtgtccgaggcaggcagatcacttgaggtcaggagttcgagaccagcctggccaacatggtgaaaccctgtctttacgaaaaatacaaaaattagccaggcatggtggtgcatgcctgtaatcccagctacttgggaggctggaggcaggagaatcactccaacccgggaggcagaggcagtgagcccagatggtgccactgcactccagcctgggcaacagcagagcaagactgtctcaaaaaaaaaaaaaaaaagaaaagtcattccaatacccatagtaaactggatcctccggtaaaaataaagttaaaaaaataaaaaagtaaacatataaaaatatgtattattatatatacatttaaagtatagtttttataaatgtacagtatataaaacgtctgtttatggataaattttatgcgtgctacacttttatttatttatttatttatttttga[134 bp omitted]cacgcccggctaattttttgtatttttggtagagacagggttcaccgtgtcagccaggatggtctcgatctcctgaccttgtgatccgccctccttggcctcccaaagtgctgggattacaggtgtgagccaccgtgcccggcccttttatgttaaatttaatataaaatattttcttttatatcagcatttttatgtaaatatataaaatataacagcagctagctcacagctttgctgcatggattcagtgagtttacacacatcgaatagctctggcacacacaaagcattgcaccagcattcactatttattatttttatggttttgtttgtttgagacggagtcttgctctgtcactcaggctggagtgcagtggcccaatcttggctcactgcaagctccgcctcccgggttcacgccattctcctgcctc[212 bp omitted]cagtctctcactgtcgccagggctggagtgcagtggtgcgatcttggctcactgcaacctccgcctcccgggttcaagcaattctcctgcctcagtctcctgagtagctggggttacaggtgcctgccaccacatccagctaattttttgtatttttagtaaagacgggggtttcaccatgttggccaggctggtctcaaactcctgacctcgtgattcacccacctcggcctcccaaagtgctgagattacaggcatgagccactgtgcctggccattattatggtttttactgtgtctcttctccagtggcatttcctcagcgaggtctttccttgctaccctggttccccgaacctgccctctt[137 bp omitted]acatggtgaaaccctgtctctattaaacatacaaaaaaaattagccaggcatggtggcacacctgtaatcccagctactgggaggtggaggttgtagtgagccgagatcatgccactgcactccagcctgggcgacagagcaagactctgtcacaaaaaaatattcttcccagttttcatcatcatggctacaagttaccaaggtcatttgtttatttggtcatttccttgagggcgagaggccagattgccttgttgttgtaccagcgccaaccctctgatgtttgttgaattaatgaacacccatttttcagatcaggaaaggggataagagacctcctgtgacttgttctgtcaatgtaataaacaagtaaattatgcaataggtaagacagtgttcagtgattcagaggaatccaaagcacgtaaaggagtaaactgttgaggtgggggcagaatttaaaagtatggcggctagccaggtgcagtgcctcacacctgtaatcccagcactttgggaggcag[134 bp omitted]gaggcagaagaatcacttgaacccgggagccagaggttgcagtgagccgagatcacgccactgcactccagcctgggcaacagagtgagactctgtctcaaaaaaaaaagaaagaaagaaagaaaaaggtggctaaggagagcctcactgagagaaagtgatatttcaacaaagacttcaatgaagagaaaagatctatgggatggtgttccaggtcaaggggagtttgtgcaaaggccctgaggcaggacagtgcctgctgtgttgaaggagcagtgaggaggaggcccctgtggctggagcagagtgagggagggagggggtggggaaggttgagaagtgcctggtgggccttgtgggggacttggcttttacccgaggggagggggagtgggagccatggaggcagaggagggatatgccctgactcaggtgctcacggcgctctctggctactgtggggaggacagactgaggggaaagagaccagctgagattgagatgatgatagtttggaccaagatgtagcaggagagagggtgagaagcgttcggattctgaaagcagagcccacagaatttgttggtgtctcagcaaaacccgctgagaatgaccaaagttttctggtcagtgccacttgaaggatggagctgctgttgtctgagattatggtaggttggagtggagggaggagatttagggatgagggctgtgggtaacatccctcccctagctgggctgtttgggtttgagatgcgtgttagacgaggaaatgaggggtgggcagttgtatccaagagtctggagtggtggggaggggctccacctggatccgatggactcacctgagtgaatggaaccaagagagttacaccatcttaaattgtcaagtcgatccatatgtcggcacagataatcacagtgcataggcaaagcttgagctaccagggcgttcgccccaacattttatctaataaaagtgaaaccaggctgggcatggtggcttataccagcctggacaacatagtgagaccgccatctctaaaaaatatgaaaattagccgggcgtggtggtgcatgtgtagtcccaactactcagaagcctgaggcaggaggattgcttaagccaaggaggtcgaggctgccatgagccatgaacgcaccattgcactccagccttgggtgacagagcaagaccttgtctctcttttttttttttgagatggagtcacgctctgtcacccaggctggagtgcagtggtgcgcggtctcggctcactgcaagctccgcctcccgggttcacgccattctcctgcttcagcctcccgagtagctgggactacagacacctgccaccacgcccggctaattttttgtatttttcatagagatggggtttcaccgtgt[133 bp omitted]acaacaacaaaaaaacccagcagccagagcctacataagtatcagccaatacgggggatgattaaatcatgtcatctctatactagatgatattatgttagatttgatattgcagagaaatatttaaagactggggaaaacagtcaagatgaatggttttgtgaacaaaggcaggtcttgataacgtacatgtagtattgccctggctctgtaaagtatgcatgcttaaaaatgtcaggaaggtattttgtttgtatttttttttttttttccgggatttctcaatctcagggccgttgtccttaggggccgaatcattctttgtggtggagaatgtcctgtgagtatctagtttccatcaatgccagtggcgtttcattccccgagctatgacaaccccaaatgtctccaagtatttccaaatgtcccctgaggaacagagtcaccccctggctgagagccccagttctagatgaaagtgtggttgcttgtcatgagggggatgggttattttatcagagaaaacaacagaagaaacaggacaagagaggtgtctgtaatcccagtgctttgggaggccaaggcgagtggatcgcttgaacccaggagtacaagaccagcctgggtgacatagtgagatcccatctctacaaaaaaattaaaaattaaaaaattagccaggggtggtggtgtacacctgtagtcccagctacttgggggactgaggcgggaggattgctggggctgggggaggttgagactgcagtgagccatgattgcgctattgcattccagcctgggcaacagagcaagaccttgtttcagaaaaaaaaaaaaaaaaaaaaaaagaagaagaagaaagaaaaagaagaaacaggcgacagagaaaagggagccaaaggttctcagcctgaggctcccgggcaggtggggcggggatggctgagcctcctagtgcctcacgaggacctccctcccctagctgggcctggagcgcttccacagcgtgggaatcatgggtctcaactcagaagagtgggtcatcgccagcattggtgccatcatggcagggtaaagggcacgcggcctctccccggagtgttttgcgggcaggaagccaccagcccaccttctatgggatcccaaggaagagtcctcaggacagggagctgacaagagctcccacttaagtctacgcttagtgggatttttcaatggcccagtcctgagcatgctcagctcacctttccagacagtctctatctagtgaactcatatacatcctgtgaatccccgcattcatgtcccctcttccagaaagccctccccacttcttgaggctctccagcactgagccctctctccacccatccagaacattggggaaccccttgagagcaagatccaagcctgaactgtccctgaattccacctcccaacagggtatgttgtgagtgtcaggtactggggattcccaggaaccttgcactcacccagcagggagtagctgggattacaggcatgcgccaccagatccggctaattttttttgcatttttagtagagacagggtatcatcatgttgtccaggctggtctcgaactcctggcctcaagtgatccgcccgcttcagcctcccaaagtgctaggattacaggcatgagccaccacgcctggctgatatcaattttaaataataatatgctaagagctctaatggaaaaagcagacagaacttacaacaggtgggttcttgtaagcagagatggaaactctaagaaatcaaaaggaaatgttggtcatcaaaaacactgacataaaaaaagcatgcttccaatgggctcggcagtggactgaatacagccaaggaaatcttgagtgagcctgaagctaggtcaatagaaacatcccatgctgaaaatcttaaagaaaaaaagaggccaggcacggtggctcatgcctatagtcccagcactttaggaggctgagtggggaggactgcctgagcccaggcactcaaggccagcctgagaaacttagcaagaccttgcctctatttaaaaaaaaaaaattaattaagaagaaaaaagaaaagacaaaaacacaatgaaatgaaatgaacaaatggaaaagaaccgcgggacaatacagaaagtgtaacatacacataatgagagttggttacagatctgaggccgaggccggtggatcacctgaggtcaggagtttgagaccagcctggccaacatggtgaaaccctgtctctactgaaaatacaaaaatagccaggcatggtggcagacacctgtaatcccagctacttgggaggctgaggcaagagagtcacctgaacctgggaggcggaggatgcagtgagccgagaccgcacgactgcactccagcctgggcaacaagagcgaaactccatgtgaaaaaaaagagaaagaaagaaaaaagaaaaaatcactgagaattctccaggaactcacaagtatcaacaaggagacgtttaaaaaaaattaaggccaggtgcagtggctcactcctgtaatcccagcactttgggaggccaaggtgggaggatcgcttgagcccagaagttcaacaccagcctgggcaacatatcgagacctcatctttacaaaaattaaaaaacaaacaaacaaaattagctgagcctgatggcatgtgcttgtggccccagctactctggaagccatcgtgggaggattgcttgagcctgggagggtgaggctgcagtgagccgtgatagcgccaccccatgccag[143 bp omitted]atggtgaaagcccctctctaaaaaaatacaaaaattagtcgggcatgatggcgggtgcctgtaatcccagatatttgggaggctgaagtggcagaatcacttgaatccagaaggcagaggttgtagtgagccaagattgtgccattacactccagcctgggtgacagagcgagactccgtctaaaacaaaaacaaattaaaattaaaacgtcagaacaacagataaaaatattctgaaacataagcggattcatttatatgaagaaaaaagcatgcaagaatatctgggaaaattctgaagcagaattataaagggaaactaccactaccagactttttttttttttcagacggagtttcactcttgttgcccaggctggagtgcaatggcttgatctcggctcaacgcaacctccacctcccgggttcaagcgattctcctacctcagcctcccgagtagctgggattacaggtatgcgccaccacacccggctaattttgtatttttagtagagacagggtttctccatattggtcaggctggtctcgaactcccgacctcaggtgatctgcccgcctcggcctcccaaagtgctgggagtacaggcgtgagccactgcgtccgggcacactaccagatattaattaggtcacacagtggcagaaatgtaaaggtgagtactgtgcatatgagggaagccagagagagacacaaacgtatgcaggaattgaaaaatgcaaccaaagacggcatctcaaataagtgaagacaggttattcaataaatggggtggatcgccttgcatagctattggggaaatagagctggggccctacctcatggctgaataaattccagatggaacaaattgaaatgtgagaaagaaagagggaagggaggcaggaaaagggggaagaagaattgaattcctaggagaaatcatgggagaacttaaaataaaaacatcctaaataataaacaataacagcccaaaaaccatttcaaggaaaacttgatcacttgataatggatcacttgaggataggagttccagaccagcctgggtgagagtgatagtccatctcaaaaaaaaaaaaagaaagaaaaagagccaagcgcagtggcttacgcctgtaatcccaacactttgggaggccgaggtgggtggatcatgaggtcaggagttcaagaccagcctggccaagatggcgaaaccccgtctctacccaaaatacaaaaattaccagggtgtggtggtgagctcgtgtaatcccagctactcaggaggctgaggcaggagaatggattgaacccgggaggcggaggttgtggtcagctgagctcgcaccactacactccagcctgggtgacagagcgagactccatctcaaaaaagttaaaattaaaaattagaaaaaatcctgggcaactcggcttgctgaggcagtttctttatctgtagacagggatgaagcagtgcccacctcacggagtgcttgtgaagagtccatgagacaactcttagggaaagcctgactacattttttttttttttgagttggagtttcgctcttgttgcccaggctggagtgcaatggtgtgatcttggctcaccgcaacctctgcctcctgggttcaagcaattctcctgcctcagcctcccgagtagctgggattataggtgcctgccagcacgcccagctaatttttcctatttttagtagagacagccttcaccatgttggttaggctggtctcaaactcctgacttcaggtgatccacccgccttggcctcccaaagtgctgggattagaggcgtgagccacctcgcccagattttttttctttttttttagtacagggtctctcctgtcgcccaggctggagtgcagtgcagtggtgcaatctcggctcactgcaacctctgcctcctgggttcaagagattcttgtgactcagcctcccaagtagctgggtctacaggtgtgcactgtactttaggctaatttttgtgtttttactagagacagggtttcgccatgttgcccaggctggtcttgaactcctggcctcaaatgatccacccgcctcggcctcctaaagtgctgggattataggtgtgagccaccatgcctggccagaaagccctaccacgtttttacacatccatagtccttccactgcaccttggagggtctgggaaccctgaaggaaccactgtagaccttctttcactccatattcttactttaggagctcagacccaaaaccataccccgaaggcctaaaagaacctttctctggtaaggcacggggcagggaaagccacactctgatgctgggaatggatcttttggttccagagtagaagggagaagacatgctccagagtccccagcgctaagctgagcccagctgagtccccagctgctgcctgctgacaaaagtgatctcaatcagtggctgccacggtgatcctgtaatgtgggctgctcaggaatggaactcctgctcctctgggtggagctggagctggagcacagaggggacagatctgctcaaatggggccagtgacagctttgtctcctggaggttcactgagctctgccacactgaggccagagaaaaacccaccagagggaaactgggagatggcacgctggctcctgggaaaaaatgtctttgcctacatttttatttccgtccatccaaccatccatccatccatccatccatccatccatccatccatccatccacgcatccatccttccttccttccatccacccattaacccatccattgatccacccatccattcattcttccatccactcacccatctatccatccttcctaccatccatcctttccatccatccacccatctgcccttccttccctccttccgtccttccctccctcctttcctcctttccttccttccttccatccacccatcgatccatccatccttccatcctttcttccacccacccacccatctattcatccatggtccacccaaccaatcatccactcatccatcaaaccacccatccactcacccacccatctgttcatccatcatccatgcatccaccttatgaaaccaagttttcttctcaacccaaaccttgctgtctgcttccaagtagagagcacagcatcagaagcaggatgtgagccgaattctctgccctcttgaattgctggtagcatcgtctccagccttgctcacactccccacccccaccaggcttggtcccaaccctccttctctgttttggtcactgatctgggggcactgggacacgtagtcggggcagggggccccaggctacctcgcaagcctgcccactgactggacaggaggaaccaggcagatgcatgcgtctgctttcccatctgactttatttcactttttttttctataaaactcctccataatttcacaatttaacaaaagtttaaaatccaggaaagaaacaatcctgtaactcgttacaaacacgattctccttattccttttatccaggagttggtctcgggccgatgagtgtcctagttcctagtgagacacgttctttgtaaaaacccttatgggcaagaaaggtattcgataccatttgctttccggcgtcggtttacatttttgttcaggagagagcaaaacacagagatttgcactgggggcaggcggcttaacaggaaacacgtggcaatcacaaagtgccaggcccctttcctatggaagtgtccccagagccctcgtgggcccagccgccgggcagctggggtggggtgggagagcagctggggatgctgccttgggagcccatgctgcccagcacgtccatcaggtggtcacggagccagccctgggcccagagcagctctggaggacaacgtgaggccttccggccagaggaggtaactgagaactgggttggtgcttccggaggccttggaaacggcaggaagggccagacgccaccaccgagagcaggcgggggagcccgaccctcctctggctgagtggaaggctgctcgagtcgctgtgtggattttgggggactcctgcgaaggagaaaggccagcaccctgggctgaggttcctgtccgtgaccccggcggcctcttgtgcgtagagctcccagcagcacgggcccccggtcagcccccctcaggccagttccttcagtccaatgtcttagtttccagagaagaaaggaagcgccccatggtggagtattgttggccgccctgggaaggggagagggggcacaggggcctgccctcttcctgatacctgaaggcagtggggccgggagagaaacagagcaggtggcgaggagtcccggaggcttcctccgaaggttctcgggcctttccccgagagttctggggagtttccccaggacagctggcattgggggcagccttggaggcatgggtccccaccaaggagtgttcaggatctgctgacagaatcagagcagggacaagatgagggacctcagggagggacagatggagccccccaagtctgaactcataggctggggaggaggagacatctaggtgggttcgagggggtgcgagcccacctccaggccctcagccctcttttcctcataacttggtcagggcacaaggacttgaaaggacttgaaagtcagggggttgagaggactggaggcgcctcgagtcaatgtctgggaaacagaggctaaccaggcaggcctccagcccctgggacccccagccacgatgggctggctccgcgggagcgtcctggccctggaagagtgggccgggaaggaggaccggcttggcccctggagaatctcaggcataccaggagtggggctgcgggcgcggcaccagcatgaattgcggcggtggaggccggggcgggccaggccgcgaccagagagaaaggcagcctgggagggccagcccggccaacccaccgggcctgctgatggccgagcccacgctcgaggggctgaccagagttcaatgcgcctcagaaaactccataaactatcccgtcttatttggcaaaagctcatatttttttcaaagtttgaagacttgaatgaaagagaggaagaggagcctatgggaggaggccgagccccagggcggctgatgcgagtctgtccgcggagactgttggcgctagtctgagtagagcccgagagcagactggtggctcccgggcgccctgaggactcgctgccctttgtagtgttggctgacccccccgggagccccggtaggaggcggcggcatccttggaacggcaaagggagaattcctccatgcgcctggagagggccagctgccgtgcctggctcggcctccagccccacaccaccgcagagacatcttaacctacaagccccaccgtacgcaccccccacccaccccacgtgcactgctgccacagaaacgcacatggacactgctcttgaccagacagtgcacacacatatataatagagagaactatacagcacagaccccagcgcagcgcgagccggggaggagccggcgctaggtctacacggaggacgacgcagacacacaggcagggccttctgaggtccagggtgggcggagggtgtgttctgaaccattcgggaggctggagatgccccccagccgtcgatccgctgctcagaaaggctggggcagcgacgccgcacagcccgccgagcagtgggggctggtcccaaggctgggcgaggggcccccggccctgtctctgcccagagctgccttcaacaccagccgctctctgaggggagcccagagagcccggggggcggctcccgtgtggcccagcccggccccagggctcctggcgatggagcggggagagtgggcagggagccgccgaggaaagtgcagcgggctgtgcgggcgaggacagggctgtcgctaaggcagtgctgcgggcaggcgagacgggagaggagggcaggcgaggcctggctgcagcctcccaggaccccggcggtgggggcccggcacgcggcccagggtcatgtggccacggcctccaggcagctctgcagtttgcgcacggtggtctcgtccagggagaagaggtcgaagtcgaaggtggtgttggtgacattgaagtggccagtctcctcgatcagattcacaatctgtaaggtggtggcaggtggcttcaggggcagggggccaagggtggggttgccctgttccctaacagaggtaggggctcctggggcagcaccaggggcccccgcagcccacactcctcacaggcaccccgacctctgccgggcaggaccctcaggggggcgatacctgctgcagcacgttgcgctcccgcagcgccatcagcctccggtgtagctccaccagctcatccgtgtaggcctggggagggggggcaggtctcagcagcgtgtgggggccctggacccttcctgctcccatgcccagccccacccatgacccagtccatcccagcacaggacagaggtagccacatccaaaccaaggaaggcccaaggctgcaggggcagcccctcagctccaaggccacaccgggaggggaggaaggactgtccctgctcctgcccaggaagagtccaactgtggggtgttggggggctctggggtcctccactggctgcaactcccaccacccacccctccgtagcctccccgccttgtcgtaggtgcccccccaccttgtcgtaggtgcccttcttgaggatcttctcaggcttgctgcaggactcggggctcctccggcctgacacctgcagggaacccaggtctctgctgagctgtggcccacaccctccccagccccgaaggccccacaaaccctcctaggacagcccggcccagggctaagcccggcctctggtgcaccccctgcctgcaggccccaggctcaccttgctgttgggcgggggtggcttctgggggggtgggggctcacggctgggcagggaggagtcggcgctgttgtcactctcgctgtcgctgaagctcaacctgaaccgacacacgggggcgcatcaggcccctgccgccaccacggcccccaccccacccccaggctcaagcctctgccccgcacggagtcggtgcctgagcccacacacccccaacagctccattcacctctgcgcaggaacctcaacttaaaaatactgtgtgtggccaccaagaggaaagaaccccaaggaaaccaggccacccagaggccctttgggggccgcccgagcaggccaagagtgctccgggatacccgggacacaaagccccccagccaatgggccttgctgggctgtggtcctctgacttggttctgtggctttaacaaggggaggaggagctgcctgctgaaaacctgccctcttctcccagcactgccctagggcttccatggccgcccgtccctccgatgctcccctggccgcctgaccctggtttgctctggacagcaggcctccatcagtcacatcggcccccctgaccctagagggtgtggtcctaaacaggggtatctggtggtggggagaggtccaagctctcaacctcccctaccctggggggcaggtctttgacctctgcctcagtttccccatctgtgaaaggaggctgctatgaccacacacagagcctgggcccatttttctctcactctgcgtgcctggggtcccgctctgccagggatattttgggcttgatccagtgagaggggcccctgacaaccatcacttcacaacacgtttaaaacacagcaaaccccaggcctcctagtgaacaaggaggtgccagaagcggctcgagcacaccggacttcccggtgggcagcacagccattgtccctgttcctggcctgctcctgccccggcgcaggctccgttcatctcttaaacttgcccctcagtggcctcaggctggggccactctctgcagctgcctcccggctctggcagctccaggtctggctcacgttgcccaggcgacgcccctgcctgtgctcctgccggcctctgccccgcatcccacaggtgactgggatgacggctgggcaccgctgcagactgggcttcccaggcagcagaccagggtgtgcagaagctccgacggtgtggcctgggcgctccctgccccggcaacgcagggacaaggccggcaagccctcacccagggcccacacaaacgttccgggaggaatcaaaaggcgcttcgcgtgtggctcggtccctgtgccgtgcctgccagcccctctagaaccgaaccttccgtcagcctctctgcgctcacggctcttggcgcaagcagaatccaccctgaatgtcaccgaacgaggcgggagcctgcttccaggtcctgtcccagggacgccacagccctcctcgtgtctagagtctaagtccctgtcggagtcgtgggcccggacctcccaccagcggctcccccgcagtgagccactgctcctgctctgtctgcggtgggtgggaatcccgccatgtgcctgctggcctggcgcgctgcacacggggaaccaagcagaacctgctgcccagcttgcgtgaaggtggctttagtgaacaacacacctgcaggcgtctgtgaggctcccatgcaccttgctgggtgcagggtgataaccagccctgtctccagtaggagccactgaggcctggaggcctcagcctcacgggaggaggggctgactgccggctctgctacagctttggaaaagcctggacccccgcccgctgaagcctgtgtgcccggggccaaggccagcacgttctccactgtcgctgggttggaggccgagcgcatggagctctcccaggtggggtcacgccaagggtcctgcatatcccaaggatgtgcctcggcacccctgtgcctcctggggaaaaggccacaggcagccaaagctgctcccacactgggtgtccgctgccccaggacgggctctccatggatcctcgccccatgtaaggcaggtgggaaaggactgggagtctcctggcccaagagcagagaaacaggcctgctcccctccccccacctccagcctgggctccctcctgcacccctccctgccagatagcccacacctgccagtgaccacgaggagggatgccacccaaggccccagatgggggcagcccttgaggccctcagcctcagggaccaggagaggacacacagccccaggcccaccccaaggcccaggctggactggggccacctggggatggatccctgctttggccctcccaggggaccctccagtcccaaccccacctgcagccccacaatcactgcagacccagccggagtcgccccgggtggccgcctccgccccctggctcccaccgggccgtcacctggagtccctccccgggttggtcttgccggcagcctcctcgcctgacgaagagtcgtcctcgtcggactcctcggactgcaggtcctccaccatggagcgcaggggtcctggggaggcggggcagggagggaggggagacaagggcagggctccactgagcctccagggcccctcgcccatgaggccacgcagagcttcttgacactggtgacccccaaatgcacacgcccgtccacctgggggtccctgtgcccatctctaagaactgcccccacaccggcagccacccgcttcccctagaacgccctggctcccccacccctccctaccttcctggccctgctcgcaggcctcaggggactggccggcagtgggcgcgcagggcccctccattgctgcagccggaggagaacccctcctctgctcggggcacagagatcagaagctctgccgagagcccagggagggcgagggagccacagcctggctgggaagctgggcctggggtcacagatctctcttcctgcaccctacgccggcctgcccaccccctcggtaatcccctctgctgctcccagtccaccgtcctcccctttctccagaggcacacggttccagtcccctacagacggcatcttggtttatattcctgttaccaaggcaacagagggacacaaagccctcaattaccttagtcacatgatcccgcttcagtaggtccccctcccttcccggcagataagaacacttggagcgagtgtaggcttcaagggccccatcccccagccccctcggcaactgcacggctgaattccaggccagactccctccacaaccccgcacactcctctcccccagcccccctgcaaaggattccaggccaagggggaaggaggctcttgttccaatccaggagtggaaacgctttttgcctgggagtgggtgctggggtctggactggggccgggggctcagggcagctctcccactgtgtcctgcaggctgcctggtccccagggccctccccactctggggcaggctggtgcagccaatgggcctatgtcctttccccaaaaagccgcccctactcagggtggcctgcctggagagggagagggcactccaaacactccggcagcaggagaccccggccgtccacaggcagccagtgcctcgctggccctggggagcgggtgggatgggcggaggaggtgacgccgtccgtccatggtccccagcagcacagggagagttctggccatgggcagggccctcaccagaagcccctcaccagcctggctccaggcacggggtgcatgccaacagccaccacaaggaacagtgcccccgggcctgactggaggtctggtgacttgttcctgctttgcttttaaatatagactcccccaggccaccaaaaccctccatgtacagatctgcagggcccagcctgtgcaggcagtggacgctgaggaatgcccatgtggcctgagctccaggccctccccggccccatccgtgccccccagctgctctccatacacaccttggctgtggttctgggatggctcgaagtctgagtctgagctggagtctgagctggagctggagttggacgggcttgactgggcagacttcacccaatggtgggatgggcagggaggggagaaagggagagctgtcacctttcagcagagacaaagggggccccctggcagcagctacgctgagtgggtctcccccagacacccctagggtcccaagggtacccacgtgtgccgctgagaacccactaaggagccagcggccaggccatgcgcagcctatagcctcccgtgccagccctaggacacccgtggatgtctgggtttccggtagcgccaggagaccgtgtggaccacgtgggctctcctgtctacccaggcaggtgcacagggtactgggagggaggctggggcaggggcttgaagtcccacaggtgggtgggccttgccttcgtccaagagggcaggcattgactggtgtcgcaaaaatgtctggaacaggaaagctgggtgtggacacttcttgttctgacccagtgctgtccggggctcaggggtggcagagagctctgtatccccacccattcgctgctcctaccgccagctgcccaagacactgaagagcgtgcgtgcacaggggacagaagccatgggcaagcccggccccacccgcctcctcctcctgcagctgtccttccaggctcagccaccagggggcagtaaaagccacaacaaggacacaaggggtgggatgccaggacagagggtgacagtgcagggcaggcgtgtatggggcagaggcgtagctcctgggtggacgggaggcaggcactgcagacacctgcacggggaggggcccattgttctgggcccacatttctgccaatgagctcatcccaaggggtgtgccagaggacatggcgggcccagggcagccccctcaccttgggggcccgtctggtggaactaggtggcttgagcccctcagaccagtcccctccagggtcctccctccatcaggaggaggcagctggtctgctggattctggcaggggccgctgcagccgccagccatgcaagggaagccgtgaacggagtactgagctggtgggactcaggaccttgagtgcctgggagcccccggcccctcccctagcatgtggaggagacagcctccaccctgcagaagggtccccacgaaagcccaaggcctccccaagcagcaggtccagactcacccgtgcctgagagggaagagggacttcccaagggtttactgcagcccaacccagccccctcctgcccctcaaaccagcccctgccagcgccccttcccaccaacacatggcgctccctgatgaatcatcactgggaaagcctgccgtggtgcccatcagtcactgcccactcaggctacctgagtcccggacacataccccagagcgtccaggacccctggctgggcctgcctggagctgggtgatgcacagcctggacttctgttcttgggggccaggggtgagtaagaggtgaccgagagatggcctatttaaccccagccttctaaccagcaggccttgctactcagaacaaggccgtcctatgtcagcctcagttttcccagcaccgccagctgcctgcacaccgaggccaaggctagtcctcccttgacctccggatggaatccctggggcagaggggtgggcaccaacctggagggaggtggactggagaagtatccaaggtcctggccccatatcccatgcactttctcactaaaggtggagagggggcagttcaggcggccaaaggaggctgcacaaggtcagcagggatggaagcagagaggatgctgagccccgagaggcccccaagcctgtcctggcgccgtgccagacagaggaaagccagtcaggcacacgcatcccctttccttccgcccaaatccaaggggcagggaggaaaagaatccggaaatggtctcagccagaagagccctaaggtggtgtgatcagaagggccaccggagcacgcccggggctcagagggagggcggagcagactgggtccacgactgactccagatccccaagggccagggagaccccaaggcagcagctggaggacgtgggagctcggctcggggactcggcccaaagagtggccctacgagggtgggcgtgggccagaccccagctggtgcagattcttccgatggccggttctggtagcacagccacacacagcctctggggaggagcagcccaagacggccaaggggaagccaaggggccagtggtctggaaggccgatgtgcttcttcaccatagcagcctgggcttcggtgaagcccccgggggaagaggcgtcagggactctgtgctgttggggcctgggtctcactcccgcacagacctcggggcgctaagccgcattgctcaaaagcctctcagcacgcggggcgctcttcttcggccaggaggaagtcccaaagcctcctccagcaactccagcctcaaggccacccagccactctaagcagcggcgtccgaggtggcaggaagctccccacaaaatattccagctgtttcacaacactggtggcgggagccaggagccaactcactcactgccgggggccaggccgggtgagcagagcggagtggagcgggccgtggagctgccttgccgctgcccagcgtgctgcacacccagccccaggtaccagaagacctcgcctggagatgcctggcctgggactgcatgtcactcagtacctatccccaaccctggggtagaagggaggggacaagcgcctgcccagggctgtggttgctgcacaggcagagaaggggtcaggctcggtgcccagcaggcaccgccaggccctcccacagctgggagggctactgagatgggccgggacttctggaaggtggcaccggcccccccaccgcctcagggtcatagcagatggtgccgtcttcagccactgccaagccatgggagcaccgggcactcagccttgccagcccatgtgtctatgagccaggatgcactgttacccagaggctggaccgtcacccccagccagccccaccacctccatgagggccctgggggcaatgagcgctgcccacataaccccctcgggctttgtggctgggacctgcattcaaagccccagcggcttttcaaagcctcagcaacccagaggcaaagcttccttgagggcaagccggacccacaaaaggcccctgagggctggggctggcaacagaggtaaatggcccaaccctcatccatccattcattcatttttaccgggcccagtgtctgttgtctaaatgccaagtgccagataatagcgctggaagacaccaccgccgtcccaggccccaaacagggtctggccacaagaccatgaggtggctaccagctcttgcggctcaagtcatgtctgatgcagtcctctgagaatgtccggacgctgtgctgtgggacaagccagcagcctctcatggtgacaaggccggtccctgacaggggtcctcgttccaagctcagacactggtggggccagatgtgagtatccccaagtcacagctgtgtgcgatgggtgtgggcaggagggatgctcttgaccccaccagccacctaaatagggagccgggcacggacctgttgctcctcatggctaggggctgtctgaagccctcatcattaacctccagacaagggtgagtctcccagatgccctattggcagagctccaggccgggctgaccacgccatggtcagagcaaccatgagacacgcttgcccactggcaccagagcggccaagacccgggcccatgcagggggctgctggaggaggggagctcagaacctcaggaccacaccatcatgctttaccagagccacccacaaatgccaccgaggaggcgaggagggactcctcacgaggcagactttatcacctgacagacagggaaaccgaagcctagtgaggcgtggaggccccaggttacaagaagccagtgggaggagcagctggtgagacctgaggtcctggctcagatcccacctccttccgctgttccagaagggaggcgggtcccaccacactgcctgcacctggctgccctgcccccagcactcactcacctcggacttgaaggaggcctcgtcctctgagttggactcctccacctccagggcctttttggcctcccggggctcactctcggccttcaccttctcccctctggtgctgctcttgtccttggccggcttcttgtccgagaaggaggaggaggaggaggtgcggggcgaggtgcctggagcactccgggaccccttcgagctgctcttcttctgcttcttggcgctgggctttggcgagtcggcggtggccggccgcttgctggaagcccggggtgggggtgggggtgggggtgggggcccacccttgggggacgtgctttccagcttggtctctttcagggccatcttgggttccttgaaggcagccttgggcggtggcgccttctcctccttgggcagccggccctcgcccagcttccgcgaggtgtccttggagcttttggcctgctcacgctccagctccttggaggagctcttgctctcggagtctttgcggggccgctcccggtgctccttggtcaccttgtgtggcttggaggtcttgctgctctccttgttggcgtcctgcaaggccaagagcagggagggcaaggggagagacaaggtcacgtggcattgcggggcgccctgctccgccacccctgacccctacaaagcataatccacctgattcagcctcagctagagaaactcttccataaagcaaaaaggtaaggcagtaggtgagagttttacatggagctgtccctttaaactactaggaagtgtcagctggtccccggcagctgcaggctaagattcccctcagaattgaactgacattccctgagggattcaagaagagcacagggtgagtcaggcagagcatggccacttcgcccgcacccgcccgccctaacacctcacagctgggcctgggcaagtcagaggctgcgctggcactgcggggtgctggcgggcactggacgcagccctgcccctcatctcagcctccttcgcccagcactcatgctacgtgcgggaagctcagtgcttcctgctcggtcactcacgggcttcctttctgagccccgtcggcccctctccccaggactccacacccccagggtccagccagctcaggcctggcttcgggaagccaactgctgagcgcccactgggtccctgggtcccaggtaccgcacggagcaaacagctcccgggcttctcagaagggaaaccgcctgggtcgctttcctaaaacaccgaggacattcctaggtctctgcctcggaaaccccgggggtttagggtggagctggactcgggggctgatcccattgaggacagaggtaagatgatggcagagagcagcaggacacaggcccaggagtgagcccagctctgtgacctgcacaccacaggacccaggcagaaaaccgaagccatctgtgcctgcttcctcgaggaagggcaaggccaccacctcactgggcaatggcacaggccaggctggcagcgagcacacagtgtgggggctgccagcaccatggctgagttggctcagcccgcggccagcctgggcgctgctgcttgtatgctgtatgtttctgccctacaccccatccgataggcacactgccagcactccccacggtgggagccacgccttcaccttccctacagagaccctgtatcaccccacgcacccaggagcactgagcaggcttctctgctgttagccaccaggggctccacccttgctaggaaaggagcagcggccagcaggtgcacggcggccccagagcctgtccagacaattgtgtacctggcctcccggcacagaagccagcagcagccagatcccgaaggccctggggaggggctccgggagcagtgagagtaccagggaggaggggggccacgcttcacagatcccccaaagacatgcgggaggggcaggctgggtagaggcctctgaaaaccacctgagtgtccagggacagactcctcccagcaaaaaaccacagggcagacacagctgctgccccatggccagtctcctgggctggccatcttcttgcaaagccacagcccacattcagtgtcaaaggctcaggaacagtaccagtggctgtgaggcctctgccacctccttggagaaagggcaagccctgtgcccagcctggctcttccacctgggacagcgggagtgcccccagaatccccccagctggcctgggccatgcagggctatcagggggtgtccccttgggagctggggtgtggaatggggctgtgctccacagcaagctactacccaaggagggaggtgtgagagactgcaatgccacctgccaccctggcctcttccagcaggggacacacgcccagctgggctgcaggagctcagccggggtcacagccaccaagggcagaatgagagcaaactccaaaggcacgtcagaggcccctaacacaggtctcactgtgtgcccctggcctggagtcagctgagccgccattgccaccagggcctgcctggctagaaggagtcttcccacacaggagcacaggcacccgacaccacaggttctgaaattaggcactacgatttttttgtttgtttgtttgtttgcttttgttttgagacggagtcttgttatgtcgcccaggctggagtgcagtggtgcgatctcggctcactgcaagctccgcctcccgggttcatgccattctcctgcctca[133 bp omitted]actaaattttaagcataacatgagcactctccagggtgagaagccatcaaaatcacgtttgcaaggttgtctgcgaacctccacgggaaagagcaaccaggccaagtacctgacattacatgggtgacacctggctccctgcagctgctgccaggcaaggctgtgagagggtcctgccccctctatgaggctgtggttcctgcctgccacgccactcttgggtggtggctgtgaagtggggacaaaaccccaggactgagtcccctaaagctgccgcagctgcactcaccagcagtcccccggcctggggattctgatgggcaaggccccaaaaggcccacctatcccatctctctgggctcagggagccctgctgaggcccctctgcttggagcacatggcccggccactcactctccaggcagagagccagtgaccaaaggaggtcgctcagctggggaagaggccggttcatgggcctgtgccacccagggctccatggtggggccgacagctcattcgccaggctagggctcggggcagaggggctttctcagaatgccctcagcagacaagtgcctcggcaggaccccatgctgcccgatgctccccacagatgccgcctacatctctccacccggtagctggagaagcctccagggacggagagggtggagcccacaggcctcctaagcctggtggataaactcaccagctggggcctccaggggtctcagagacactccggcaaaagataccaccagcagccccagcagacgcagccccgccagccccagggagggcacctctccaaccaagaagtcctttctacgcagggttttaggtggcttgaagtgacccgtacagaagaaatcttgttgtggtagctgagagggacactgccaagatccccagcaagagcttttccttcattgagcctccacaaggctcagggagagataggccaggaggccgagtggggagaccccagggttccgtttcctactcagagaatctggcaagtctgacgatttctaagacctgctggccttggggaaagagccagaaagacctgcctgggtgctgcggttcttctcccgcatggctgacggtgagtctgtgaggcagctggagagccctgcctgtcctgcctgggatggctgggcccacacgcagggcctggcagacaagtgaggtgaggagaaaggagaggaccggtggagagatgtgtgggtggcaggcaccgggcagctgccccgagggcccgtgccgctcagcctccaggaacggctgtgctgagtgggcagctacagaggactggggcgtgctcaggggttaaagggacactgtgatgccatcaaagggctttctagcttgtcttctgaattgctgctcagggatggtttagagagagaagcctcagaaaggccgagtgccacccacctgaccgactgggccgagatgagaccgtaaaaagtttcttccacactgaaattcagctggcacccacctggcttcccctgcccttcccccacgaaactctgcagtgagccatagcccgagatgcaaagcctggcatagccaagggcagaagtagccccagctgccctcaggagggttgaagaggtgggtagctgcagcctagacagagacactctacccagcggccgccccaacagccttcggcgaaggtctcagggcttcaggccgagcagtcctggggccctgccatcacttggcagaacgggagaggactaggcagggtctctggcctcaagatgaacagggcaaagagcccatgatcacgggcttattcctgaaatcctagggaagcggcagtgcgcagcgaggggtgtgcagagagctcaaagaggaagacgccaagggagcgagcaggtgcggaaggcccagcccagtggagggagggcgccggggccagacccaccacagctgggccccggcgctcccacgcgactgggccttccgcctcactaaccttggagccgtgggatggtttggtcttcttggggtcagagaaggcagagagtggaattgtgggtaacatggggtagtcgggactgggcctggacaccgtgtctgctccttcgggcattaccatcacctagtgacagagaagagacagtcattatcgatgggcagggggcagggggcccacacgggccgggctgaaggtggtggggcttccctctgcaggaggggagaagggagagcctgagcgctttcccgaaagaatcccaggtgcttccctgctggggactgggtgctgagcacgcagaagaagcaggcatgggtggggagcgaagaaaagcccagggtcccaggatggctgggaccaggtggggccacgcggccttccgggaacagtggaccggagggctggcccaagaagacttgcggagcacactgagaatcatgagaaggcagctgcggccgaagcctgacctacgcgcttaggtttagggggaacagctcagaagtgtgagaggccagccagatgcctgcgaaaggcaggcagcaacttcccggggtgcacatgggtgcaactccagtgggtcccacgtgcccggagaatgagccgtccttggtgtgcggtgactgcagcggacccgaacagggcaagagcacccaggctgaggccgagaccaaggcagacgacctgtgcctactgggggggtctctctgcaaagcaggcccgagtgagccagcgagcctgcagcatggggcacctgctcctgcgctccatcagaggctacggatgacgaaagttctggggtccttccaggagggctcccaggaaacacctgctgtgcagggggaagctcggagcaaggtcttgagatatcaacactgcgagttaaggaatgccaccaccacagagaaaagcctcccagatggccgcaagagagaacaaaagaagaaaatacacttcaaaaaaaaagtattgaagtcggtagaagaagcactgctaacagccttgagcacctgcagttcccggccagccaagcctttcatctaaggacactgatgtcatgcggccatggggacattggctgaaaagaggccatgggcccctagggtccctgctctgagctgcttctcagagcctgtctgaccatgatagctcagcactgacagcatgtgtgccccagccgtccctgaaaacacgccacgggaggccctccacactctggagcacgcacatcacgcaagctcacggaggagccacagaaggctgccatgcacagacgggcttgccaggaggctgagccccattcgctctcaggcccattccttcgactctcatggtaatttaccttctttcccctcaaaacaatgccctagactgactgtttcaggatcacgcagtgtctcgctctagcacagaccgttgagaaaaaggaactgggaactgaacacgcagatgactcccacctccaacaagtgctgccaggaggaccaggctccccggcggaaacacagaccctcagccatgggggcagagacaagacacggtcctaaggggcacaaggctggaacggcggaaagtcctaccctctctcccattaccgatctccaagcaacccccagtgagaggagcagagaaagcagcgctcgctgacacagaaaccagcccctcctcccgggtctcccagcacccacggcggggggctggggtcacctgctgctagacggccactgcctggtcccgggaagccccgagaggagcccctgccaccgaggcctccggctgctcctaaggctgagagccccactccagggcaagccctggaggcctggaaagttcctgcccagacagccagctccccagacagcccaccctcagagggcagagcgcccagcgcctggggcagagaccccccacggcgcctgcttcagcctgcgcgtctctctgtggagccagcgctccctcctgactggcccttcctcccagccttgccccgcgcctcctccccgcccctggcttttatgtgttgagacgatgccctcagagccttcatcgctgtggagcaaaggaagccgcctcccacagggagccaggtcctggctgcagcccagagcggcccagggaacgccacttcccacagccacgccaccacggaacctccggggacgcccaaaaacacctactgcaaacgtggtgaaaacacctggccatgaaagaaggtggaaaagcggagccaggagggcgctgggacccagccctcacatcctcaggccacccagcactcagccacgccatccacataggcccacgccggcactgccctccccggatcagaaccacaagcagggcttcacaaggatcacagcaggactcactcaagcttctacatggacagacgcctccttcttcttaggagaacgacggccaccaaggacctgaccatgccccatgaggaggaaggaggactccccagcctgacacccacagccacggtgccccaaatccactcaggaggcgacccaccccacccgcataccccacacgtcatacatgccacatacacacctgacacattcacatactccccataacacacgtcacaccatacgtgcgtgacacaccacacacttcccgcaagtgacacgacacacacgccatgcacacaccatacatgacacagcagacagcgtatgtacataccacacaacacacacacacgccccacacccgtgacaccacacaccacacccctacatgccacacatgccacacactgtacatgccacaccccacacatacacacgacacacaccccataccacacatgccactcacaccatacacgagacacatgccacacacaacacacgtacatacacatgacacaccacacaccgcacacgacacacaacacgccaccccagcccgctccatcacaggctcaggctggcacccaggcaaaggctctgtggccctgggccctgaaggtggcattgctgttctgtgaccaggcctcagcctgcacgtccctccctccacgcccccctcctccataaccaccaccagccctgcgcccaccctgttgccaagagccctcgtggggaactctgagcccccacagggtccggagggctcgactccagccaccgcatgggggtcccggccacacgactcctggagagccctggtcccagagctggcactgtcgtctggcctcccgaagtcagaggtgatggcgatgcgcacggcaggggccctgtgcggaggccctgcccagctagttacaagccagctccaggcccagccacgcggtcagaccagcctcgcgcccatcccttcccagcacttcctgcaggaaggtgctaattacccatggccacccagaagcacagggtgaccagcaacgagtcacctgcagccaccacgccccggcacaggttgtggagctcccaggtcccctccagctctgctgggtgctgccgtgtgacctgcgccttgggtctcggcccccagcaccgacacctctggctgggcacagacggccgcagcaaagtagcctcggtggagcggccccttggcgggcaggggcggggcacactcaccccgccggcccgcaggagcttgtaccggaactccgtggtggggttgttgaaggtgagcttctcgcagcgcaggtggttcacgggcgggttgccttccaggttcaggaacaggtcgtaggtgaagcagaccttcctcggctcctcctgaaacagagaaaacaagaaagtctgcatcagagggtggccgtggtgcagggacacagctccccattggccctggtcctcccctctccctcactgggcctctgttcccctccctccgatttgcgcccacttctctctcagggcacctcctgccctgcccttattcaaaatcgaccagcttactatgtgcagctaactgggtcttgcaggccccatggcagaaagaaagctcattcatagccatgctctcggactgttatgggaaacatgtacccccttcaaccctcacagcgccactgacagacagggaaaccgacgcacagacaccaactaacacgtggcagcactgagacctgccccaggcctctgaggcccacaatctcaccacctctattccccacttcctttgcagccagggccaagcccgacagacgcaggacacaggacacagactcaaacgacagcacagcacccagagggggcaaaagtacaaggtcacgacccagtttccaggaggctctgtccactttgggtgccgccccgcaccctcgccaccccagaagacagggacgctcgcctggcatggggcaggcgctgatggattttccgcacgaaggtgtgaggagttgacagggtggcctggaaaagggctgtgagtgaggggctgtgatgaatacagaaaggccaggagggctcagggcaggcaggcttgcaggaaggagctgtctgcacgggctcctgtggaggcctagccacatgtgcaggggctgtgtttctgtgaaccttgaaatttcgaagcaagacatttttttttttgagatggagtcttgctctgttgcccaggctggagtgcagtggcgcgatctcggctcactgcaagctccacctccctggttcatgcctggagcctcccaagcagctgggactacaggcgcccgccaccacgtctggctaattttttgtattttcagtaaagacggggtttcaccatgttaaccaggatggtctccatctcctgacctcgtgacccacccgcctcagcctcccaaagtgctgggattacaggtgtgagccaccgcgcccagctgaagcaagacaatttcatctgcttttccttaagaaccctgccccatcccaaatgatgtaagccacaggtcccaggggagtgtgggaaaaccgcactatgacaagcacgaatgtcacacggaagaagggaggttttcatggaaacaacgtgcatgggccgggcgcggtggctcacgcctgtaacccagaactctgggaggttgaggcagacagatcacttgaggtcaggagtttgagaccagcctgggctacgtggcgaaaccctgtctccactaaaaatacaaaaattagccgagcatggtggtaggagcctgtaatcccagctactcgggagactgaggcaggagaatcacttgaatccggtaggcggaggttgcagtgagctaagattgcaccactgcactccagcctgggcgacagagaaagactctgtctgaaaaacaaacaaacaaacaaacaagcaaacaaacatgcaggctcatgtcctaacattatgggcagctggtgcttgacaagggtgacgacaccactcaatggggactgaggagtctcttcaaccaatggtgctgggacaactggatacccacccgggggagaatggtggtggccctactccacccacacacagaaaacaactcaaaatggatcagagacctggacgtaagcactaacgccacatagctctcagaagaaaatacaggtatcaatcacgacactgcattaggcaattgtttcttataatacaacaccaaaagcacaggcaactaaggaaaattagatcacgtgaacttcggaaacatttcaaaattttggcccaggcatcgtggtttatgcctgcaatcccagcactttgggaggctgaggcaaatgcagagacatggatgagttggtaccttggcgggtgggaagtgcaggagtggctctaacagacacagggtttcttttgggggtgatgaaaatatgctggaatttaaaacttgtgatgattgcacaacactgtgaatgtactaaaaccaccacatctgtacactttaaaaggctgaattttatggtaggtgaatcacaacgcactttgttaaaatgcagtccaccgggataaaaataactaagaggatgggcgtcccgtgaaggcttctgagttggggaacactgctgagaagctcgagacatcacaccggctcagtcagcagtggggacgcaaggcagagctctgggcccggcgtcctctgcaccctctttattctcagccctttccccagcagcctaagctcgcaggtgtacggccacaccctcagtcctggtgagaggggacagaccaaggggctcgaggtgctgcagagtgccgtctctccccagcctgcctgcagtgccggacggctcacacgggtggcaccaggctccgcaagctccggggacaggcgcctcctgggagtcggggcccagctagtaacacagttggcagcggcagctcctgcggccgcccaggagtcccaagtgcacctgcatgggaaggagcctccagaaccacgagtccggtcagagcagacaagtgaacatgaacaggttcccgatccaaggccagcgggtgtggccgacagtgaccttgtgtggggaaagccctgatctcagaaaagtgggtctctgccccagccccaggcggggaggtgtgacctgtctgggccaggctagggctccctccccttgtccgaggggacatgtgacaggcttgggtaaggacatggaagggagggcggcctagggagggctttccttcccaagtcataaacaaaactgcagggacaaagtttctcaccacctctctttgtcctgccaaaacgcgagaggtggtgcctgtgggggcggcttccaccacaggactatgtggagggatgccaggccctggcgcctcttgccttcttgtcctgtaagaagaccagcccctacaggaagcccctgctacacagctggtccgagcaactgaatgtatccctaaccgacacgccccccgccaagtccacacttcccctacgcagctttccttgaggactcaaatgtggccacgtgcccctcctctgtggcccctgcctttaaggagacacttgtcccagtgggtccctgccaaactgggaacctggggctgtgaggactcctctcctgtcttcccccgaggtacgcagctggcctagttccaagtgagccaactgagtgagatgctagggcagactggaggggggatggtccagcagcaggggtgggaggggctgggaaggctccctggaggctgtggtggggctgaaggatggccaggagctggttggctcaagaagggtaagaggtggacgggtgcccaggctggaccgccaggagcacgcgtggcctcacacaggaaacagtggcatggactgcggtgtcctcgcgggacccccgggctccagcacagctgtggtggagacaggtggtgacgccgaccctggggagaagggccttggccgcccctgcggagggggagccctgtccggaggtggaggagggttttcagctcaggaacaacggtcacatccatgtctcaggaagccacaccctccggcctatggcgcaaaggcacttctgggcacagggctggctggaacctggcagataaaggggaacgaggtgggggaggagagctcttgtcctgcctttcctacagaagtgacaccactaggtgaacccggagaaggcaagcagctaacctgcacagactgtcctagctgacccaagaaggaccacgagagcatcctagcacctcaccatccacttggccgacagcagagacgtgggcagccacacagagagaccaagcctccagattcaggcccccaagacacggacacacgagtcagagggcgatcctgagtgccactgcatgtccacaagcagcaaaaaccagatggtaccaagctctgtgggacacatggtcctgactcttcaccaaatacatagcaaagcaaaaaaagagtgcttgaatgaaaagggggcgggagaatctagaaaggaatttaagagacaaaccaaagaatcacagcgtgtggatctcatcaatgtcctgattcaaacaaacaaacaaaaaaaaaaaacaagactttaaacactggcatattgagagactaagggattattaatcatcaattaatataaccaagtaacatggtaacataagagatgactaattcatgggtatggtcctggtagcactgtcttgttagaggccccttttgaaatatttacacatgaaatgaggatgtctgggatttgctccagaatgaccaggagggcagcgcaggctggaacgggcttggctgtgcagggaccacctttgggtgggtgacggctacgagggggtttgttgcatctgcctctgtaaatgcttccaactttccctggtaacttctgagtggacgctggcagcacggctgtgcagaggatgaacgtggctggggggcatcctcgtgcagaaagcctggggcctgagggacaccagcaggagcctggccacggtcctgcctcctaggcctcaggttcctcacgggcagcatggggggattcgctgcaatgccacagccacagtgctcagcaccctgcctatcacccacagaagccgtgagtgcccccacaaagcagcctgggctaagaagggcacctggggaggcgcagccagacggtaccaaagcactgggatgccccagggacgctccctagctctgcccactgcctggcacagggcaccctggggctcggaactgggtcctctcctctccacactcctggccacagctgtgcaccctggctgcacagcgagtccagccgcttctcccaagctcctcagccagcccctctctcctggaccacctgcctcctaaccgtcacccgcttccaccacagccccctttcaggcacggtatctccatgggctcagggctcaccctagcccaccaatggcctcgatgagcctggaggaggctccacatcctcggtgcagccagagggacatgctgccttcttccacgcctcctccacccagctcaccccttcctgacccccacccgcccttatcccggcctgctgctgtccccaggcacagagcacagctcactctctgccagctctccttacagtccaaagcatgtctgtcttctgtcccagcatcccactgacccatgaacaccacacacaatgggactgtcctgttttgttcctgatgggcctggtgctggactagcaccctgtctgctgaacatccctaaatactcatgtatccaccaaaaatgccacaggcgcctaccataagatcccagcagggatcacaagagagaagaggtctctaatcttacggatagtcagagcacaaaggcgaaacagccacgcagcagtgacaccagtgtgacaccaactgtaccgtgtcacagtgtctgcagagcgctgatggtgaccaggcactttctaagcactcagcggatacgaatgcttcacagccccaaacccaggggttcctggtgtccccccgtcacagatgaagatgctgaatcagacaggggatctgggcagcagcagagccagcgcaccccggcagaggttcttgggaagccccaggtcttggagaggttcctgttgcccacacaaaccaaacagggaaggcagccacgacgaggagacccggcatgttcacaactgcagagaggggcagcaccgaaaagcaaggaaggcaccccctgccggccaggtagaggtcacgccccgaagcaccctgcggccagcaccctgggattgagattggctgctggaagcggccagtgagtcacgggcactgggaatgactaaacggcatgccctctacacgagacctgggcctacaaagcttaggagcatcccagggggctgcggaccccttcctggctacccctggaaaccagcctcctgggagatgttgggatagcagctccttcatgcccctgaggcctggcagcaggctccgtgagcaatggcaaagtcaaaggtggctggccaaccagcccaggtgggacacccttagcgactccagccggactgtgctgtgacccactaatgtcagtagcctcctagagtcacgtgttcttgggccgggccaggtcgcgagcagctccccactcccaggctgctggccacgagccagcgtctctctggcctcgggaaactaagatgcagacgaactggccaaacaggtgcctgtgccaaaggctgcagcatgcaccatcccgtgcccggggtggggagtccaggcagcgagcccgccacgcctgctggtgctccttgggatgaggatcacaggcgccgagtggccaggctggccttggcacgaggcacagcaaggcaaaggccctgtggccggcgggccatgcgtggagcgcctgctgctgccaccacctctgagaggccacactccctctgccccacaccccacctggaggacacccagccttccctcccaatcctggatgtgaggggagagcaaccagccctcctgcaaggtcttcccgctcctgccgaccctggctgtctcctggccatctctgccccgccaagcttgtccagcggctgctcagcattcccctctgaggccccagggttcacagacacatgctgggcttaaaaaaacattttggccaggcgcggtggctcacgcctgtaatcccatcactttgggaggccgaggcaggtggatcacaaggtcaggagatcgagaccatcctggctaacacagtgaaaccccatctctactaaaaatacaaaaaaaaaaaaaaaaaattagctgggcgtggtggcggacgcctgtagtcccagctactcgggaggctgaggcaggagaatggcatgaacccaggaggcggagcttgcaatgatggagattgagccactccagcctgggcgactaagtgagactcttgtctcaaaaaaaaaaaaaaaaaaagatgcttaagagacgaagcaatcaagagaaatgcttgggcctggcacaatggctcatgcctgcaatcccggcactttgggaggctgaagtgggaggatcgctttgaggtcggaagtttgagtccagcctcatgcacacagtgagatctcatctctacaaaaaaaattttttttaattagctgagtgtagtagtgcacctgtagcaccagctactcaggaggctgaggcagaaggatcccttaagcccaggagttcgaggttgcaatgagctatgatcaggccactgcatgcaacctaggcaagagtgagaccctgacttaaagagggaaagacagagagaagctccaaccttacttgaatcctgacatgaacacgttaattttaaaagacgtatgtccacacacacagagcttccctcagtttttgcagggaactagctgcaggctctagagagctgactgtgtgtgtgagagatgataggggaaactgatggtattgggcatgtgataatgttaaagaattactaatttaccaatttctagccagaatgatattgtggttagggtttttgttttaagaatcttatcttacaggcacagcaggaaatattagcagattagtagacgtgatgtctaggacctgattcaaaacaacccttgcggggagagaggagaaagcaccccatgcaggctggcggctgtgggagccggaggtggggggcggctgctctgccattctctctgcttctgtgtatgctttttacgtcatctatattagaaaggagaattaaatagataagcttggcttggcccccagcctgcctcacagctctcaatttgaattcaacaccacctgtgtcccttccaccctgcccctgtcctggagctgggaagacagtggggaaccaggcaagtccccgccatggagcccagatggagccctccgccagggccttctccagccagcagcaaacaccttctccgccagggccttctccggccagcagcaaacgccttctccaccagggccttctccggccagcagccaaacgcctcctccgccagggccttctccggccagcagcaaacgccttgctctgcttcaggcggctaccttggaactaggcagcgagccctgtggggctgggtgtggggccacaggccttaccccgccacgccttagtcagtccacaccaacactccaggagggcatcactctctcaccagctgctaggagaggaagctcaggtttcgtggcatctggccatttaccgaagcctcacagaaccagtaagtgccaaacccactagtccacacatgaaaagcctctcgcgtccacagagccctgcccctcctctggacacagctgtaaggcactaggctctcgcgttcaccggtccacggcatactggaatggggctgacacacagtccggcaagaaagcaagggaagacagaaatgtggaaaaaagacgcccaagaggcaaacaacctcatccctgaaatcccacgtccaggatgcgatccgaccgaaatacccacagagtataaaccaacgtacgaggggtcaccgaggcacccctgcagagggagacccggagatgccaaatgtcccccctagtcagataaatgacagctgacacaaatgccagggaacacgacatggaccctggccagaaccaggcacagcggcctgtgctgacgccggagggccacgggcagggagttcagaggtgtgagtcacactcacgcccacacatgcacacacgcatgcgtacacacacccacacttacccacatgcacacctgtgtactcacacatgcacatgcacacacccacccacacacccatgtacacacactcatacacgtccatactcatccctcacctacctgtgtacaaacacacacacaaacacacccgtgtacacacacacccccacactcatacactcagacttacacacacacctatgtacatatacacacccactcacatccacacacctgtacacatacacactcacatgcacactcagactcacgcacacagagaactgttttggcaggacaaacattgcttatcatggagaggatttcaattccttgtaatctgcatatatcaccttggctttgtcatcaaaagaaaaacttttttttttttaaggcttaggtaaaacagcaccatgtgggctgaaaacctctgaccaggagtcagaggactcctggatgctgaagcggctcagcactggctcactgtgtgaccctggacgggctgctgcacctctctgagcctcagagagaggcaggaatcaaacaggaaagaggcagaaaggccaccggtgcctctggctgggaggacagtgtgggcagcattagcccaggccccttcacgcctgcctgaccgctcagcctgggaggccagggagaccccagaggccccgccccctcccacacatgtgctcagggcctgcagccccatgtgaaacagcgaaagccagccacctacaggcctgcctggaagaggctggccctggtcaggggaggcgggggagttttcttcttgtacccctgaacttcaaactccactgtggagcacgctgccgccactggaaggagctcgacagacacagcaggtgacgcagagggcgggctccaagcggagctggcacccggcgcaggtgacgttgcccatctgtgctcagcgtcctcacctgtgaagtgggaaaggcagaacccaccccatatacaggcactcaagtgctactcctcatcacacgctggcccagagacccccgggatacaccgttgggagaagaaagcaaaccacgagactgagagcaccacggaaccctacagctctcagattcaaaagcgctgtgggggtgatgtcagacgcacagggagagactggaccccacactcagctacgaacctcccgagacagcaggagaattcaggggcagagggaaggaaaagggaggagctccagttcctaccctgcgtccttctgtgcttcgcatttccgataaccagaatcaattcctgcatcgatgagcaattagaaaccaaaaggaggaggcagaaatgcagacaccacattttaaaatgctctccatggaaacagacgtttttagacttaaagtttggcttctattaactggaagccaaacttaatgatttctcctcagtctgacaccagaaaaggcagaaagcagccagcaacgtaaacacctgtaaaatggcagtttgaaatctggaccataacaaatgaagacaggaggaggtatccccaagatgagcccatgaaagtcaccggcccaatgctgccaggctgagagcagctgagctgagacctgcgagtggtcagtcccggggcctcctgcctccctcatgcccagtatgaggacagcctctctctaccctgaactgaggccgccggaacccacagctcctagacccccgccccatcccgagagcccgtgtcccccaagccactgccaggcagagtccagctggaggcagggtccattcagggctccagggcgccaggcccctagcacccccgctggacagcaccttccctgctctgggagccacagggcagatgccttcgtcctgtacaggaggcacaaacagtcggaaagatggcctcagagaagccaggaaagaattttatcaggtacatgccgagataggaaattggggaacataatgggcgctttcaatgcccagccaattcttccagccccttctctagggacccaggagaaggcattctgggcctctgggccgtcccaccgtcccagccttggaggtcctggggtggccgtggcgggcgcagggttgcgcagcacctcctctctccctgcagcgatgggcaccttcgttctttccttgtgcttctctgcccggctccagacccgccctctaggaaacacagatgcatctggggacccacttcagggaacagaaggatgctctggggaaagacagactgcgccacagctggcacgcatccatgcggcttgtcacaacgcggcagctcggccctgccctgggtccccgcacacaatgtggcttctgttctggctccctcggcaatccaccagccaaggcctccccctcggccacatcaaccggccgattgtccctggcggagcgctctatgggctcaccagaggggctgcccgcctcctgaactctgcaaggccctgggagcctgggagccagggagggagttgcttgcagaagcgttgctccgcttctgcgccagcaggtcaggggcaaggggagaagacaatgggggctcagagggggctccctgcctcccagcctccctgcctcaagacctgctctccccagtctcaaactgagcgcacgcaggggcagcccaagtggaacccatatagggcagcatttgcagctaagagccatctccactctacagagggtggcggctatggagggcaccccggcttggtgtccttggaacctcccctgtcatgtgcgactgcctagggccccccaacacaagccacccaggatgtgtcaggaagatgcctctgagggtcttaaggctatgaggccagtgcggtttaacttacttttaaaactctccacgtaatgcccttcctgtgccctcggacatctgcgtgtgggaggccacggtggactggtgatggctgtggctccctgtccaatgacagcttgttgcaggggttggggaggaggtctaatattagtggcaaataaccaaaataaacttctttttcacacttggccatttctaacactggactgtctctcacaatcagtgtgtacccctcatgtgctttctctcctgctctcaggacgggttccttcaattgaagtcacgggagacttagactgaaggaagaggaatctggcgtcaggggcagggcaagttttaccgccccaaacagccacactcccctttcctggtgctgttggtaccgggttcaatagaaacaagtgccccggccagcatcccctcatgtgactgcatctacagggcacctggggggctgcgagccgacaccggccacaggagaggaaagcaggccactgtcatctcagatgacccctctccccatctgacagcagctctctctgcccctctcggttttgccaagcacaccaagccagaaacgcaggactacttggcagccagcactggcatgaaagcgacaaaggtgagagctaaaaggattgccaaggaaattaagtcacatcaaatgatgcctcagagaagagctcctgagtccagctgctgatcttggctaatgcctcaaaacaaagcaagacaaaaatcaaccatgctaaagtctgctgggaacgtaaagcgggaacgtggcggggtcaccaagcggtaaagctgaaagagaccccgagagccagtcccagcccgagcagggccatgcatgtcagtgggggcccccaccccgggaaggctcggggaggccggcagcccccggcccctgccctgcccaggaccagggcatcaaagcctcccaggtcagctctgcagcccctcccgaggccctcaccctgcctcctaactgactccagggcacagacaagcacttcctgtttggcagccactgaattccttctgggagagatggagccaggtctgcattataatgtcactgacctactccagaacatcatgggacaggcgtgggacaggcacctggctggggcttctgaagccacggccacagagcttacgcccaaagaggcaggtgaacccagaggactcgaccccttatgcaggatctaacagcaaatgccaccatgtcacccccagcggatgagcagctctgcccacccagctcacctccctcacactcgccccagccccgcttcatcacctggactctgcctttcaaacagctgcccctccccctagaaggg[136 bp omitted]cacggtgaaaccccctctctactaaaaatacaaaaaaattagccaggcatggtggcgggcgcctgtagtcccagccactcgggaggctgaggtaggagaaaggtgtgaacccaggaggcagggcttgcagtgagccgagatcacgccactgcactccagcctgggtgacagagcaagactccacctcaaaaaaaaaaaaaaaaaaaaaagaagtcaatctcgcttcttaagagaacccaaccgaccctttctaactgggtccccgtgacacactcatagcacccagcccctgggcttcctggaactcattctgatgggtcacttcctctcccgtgtgtctgccgtctcttgccctgtcagtctgtgaactccacaagagaggggaacgtgttcacttggtcttcactgggcctagacttggtaaatatctgacacatgaagaaatccatgaaactccagcaaagaatggaagaaaagcaattcctcctcctcactgtaaacgaacattaaaaaaaaaaaaaccctcatttgcgaagaataaatgacaagggcctcccttactagatacccactaccctttgacagtctcccccgcctctctcaacagtgggcttggtgcatgccgccagcggacagcgaaaacagaggcatgggcctcaagtgtggcaaagggtttcagacacaaaaccagaagcactcgccagaaaaacaacagtaagacgtccatcaaaataaaaaacgtttgctagacaaaaatatactattaagagaatgagaagataagccacagacttggagaaaatatttgcaactcatataccaagtacaggacttgtatccagagtatatacagaactcttaaaactcaacaacaagaaaacagctaacccaattttttttaatgagagggaagggcaaaattctgaacagatactttaccaaagagaatatatgggttgcaaataagcacatgaaaacgatgctcattaccgtcggccgtcagggagatgcaaatcaaaacctaaccaggtaccacttcacacccactaggacagacggctataatcaaaaaggcagaaaatgagttgctggtgaggatgtagaaaaatcagaaccctcatacccggctgggggggaatgtaaaatggcacagctgctgaaaaacagtctggcagttactcaaaaagttaaataaagaacggggccaggtgtgttggctcacgcctataatctcaacactctgggaggctgaggcaggaggatcacttgaggctgggggtttgagctcagccttagcaacatagtgagactctctaacaaaaaaaaatttttttaaatcttttctttttttcctttctttctttctttctttctttcttccatctttcctttctttctttctttttttttttttttaaagagatggggtttca[131 bp omitted]gatgtgagggccggg[176 bp omitted]gaggcaggagaatggcatgaacacgggaggcagagtttgcagtgagccaagattgtgccactgcactccagcctcggcgacagagcgagactccgtctcaaaaaataaacaaataaaatttttttttaaaaagaaaaactcactgggtgtggtggcatgcacctgtagtcccagctacttgggaggctaaggcaggaggactgcttaagtccaggagacagagctgtgtgagctgtgactgcaccactgcaccccatccagcctaagcgacacagtaaggccctgtctcaaaacagacaaacaaaaaacccaaaaagttggccggtcacagtggctcatgcctgtaatcccagctacttgagaggctgaggcaggagaatcgcttgaactcaggaggtggaggttgtagtgggctgatatcgcacctttgcactccagcctgggcaataagagcaaaactccacctcaaaaagaaaataaaaagaaaacaaagagaaaaaaaaaaaaaggaaaacaacctgaccatattcaagggctggcgaagatttggagcaacgggaactcttcctgctgatgaggctgcaaaatggcacagcccctttagaagaaaaccactgggcagtttcttaaaaagttaaatagacccatatcatgtgacctagcaatctccactcatttacccaaatgaactgaaaacgtggtcacacaaaaaacccgtatgcaaatgtttagggcagccttattcataatcacaagagctggaaacaacacagacgtccttcaacaggtgaacgaataaacaaaccgtaaggcacccatgcagcggaacactcctcgaaaaaacacaacaaaacacgaagattcattcatatggcaacatggacaaatctaagtgcgctttgctaagtgaaagaaaccagatacaaaagggctacatattgtctgagtcttatgacaatctggaaaaggtaaactacaagaatggcaaacagatgagcggttgtaagggctgggggtggggagggggactgacttcaaagggacagcaagtgggaatcggagtgggggaggcagagtcccggtagatacacgactctctgcatgttgaacccagagtaaacgtcacggaatacaaattaagaaatcagtaactaataaccggatgggcagagggggcagacccaagatgaaatgcaactgagactgacgaagctaactgtattacaaatgcatgacatgaccaccccagggaaagggctgccacaaataaccttgtacccttgcagcgttcctacttgacagaaagagctgcacgccaatgctgagccctagctgccaacacaggagggctggctgttgatgctgaaactactttccgggtatcctggaattaaacgggtaaacaaacacagtacagatatcgggagccaggtttcccccttcagagacagctacaaggcagcaactggggaaggcgtgaatgagcccgctggtgctggatggagttggcagcctcagaggaacgtacgtttgttttcatattacacagatagatacagaactaaacacagatgtaaagggtgggggtggtttcctagctctgtcatatgagagaacctaaacgcagtgacaactaagcagcagtgagcacacttagctcccagatcttggcttttaaataccattttccagcaacaggaactaaggctcctgggagcagcggaagattctagggctggggcagggaaatacacggtgagcctgtggtgccagaatgtgaaagcacccccaaaaccatgggaacatgaaatgacaggcccgaatgcgagaacaatttcaataacaaacaggtaacaacagactggattatgaccccaaagaaaaaccaaatacctatgaatccatccgtgttgatacaaataactgaatacataaatggaagagaagggacggctcttccttactgaaaaattccagttaataaatgtagaaaggaaggaggaaattaaaactaccagtaggccaccactgggggaggctaaaattagtgggtggtactatgggttaagtagccctcatccaaaatgcttgggatcagaaatgttttggatttcagatctttttttggattttcaaatgtctgcattattcttactggttcagcatccctaatctgaaaatctgcaatttaaaatgctccagtgagcagttcctttgagtgtcctgttggtgctcagagtttcagattttggagcattttggtgttttgtttgtttgtttgtttgtttgttttttgtgagacagagtctcactctgtgacccaggctggagtgcagtggtgtgatctcagctcactgcaacctcttcctcctgggcttaagcaattcttgtgcctcagcctcccaggtagctggaactacaggcgtgcgccaccacgccctgctaatttttgtatttttagcagagacggggtgccatgttggccaggctggtcttgaactcctgacctcaggtgattcactcgccttcgcctcccaaagtgctgggattacaagaatgagccactgtgcccagcctgagattttggagcattttttattttggatttctggattagggatactccatctgtatttttaaaaacagacaaaacaaaacaggttatctgcacagcttcaaagtatctctcccaaaatgggtattagtaactgtagtgtttttaacctacgcccaccaggatggaggggttaattcctctcccttgagtgtgggctggacttagtgacctgcttcttctaagcaacaaccagtggagaaacctggcagatgccacttaaccaggagatcaaggtcaacctcggctgttaaccatggatcatgttaatatctggcacttcctaatatgatggaagaggaagtgcatttacctctgtggtcttcttatggaactctatagccacggactagccatgagaaaacggcaagtagagggagagtctacataataccccactagcacatttcaaagatatcaaggtcatgaaagactgaggaaagagacacaggcaacagtgcagcatcctggggtgggttccacaacagaaaaagaacatgaattgaaaactgggaaacccaaggcaagtccctagtttagttcacggcgattgtactgatgctactgtcttggttttgatcactggaccatggttatgtgagatgttaacattaagggaggttgggttgtgggggaggtcctatgggaattctctgtactatctttgcagctcttctgtgtctaaaattatttccaaattaaaaaaatcgtaactatgagagattcccagtcaggaaccatactcggttcagtaacgaagatttttatgcgtctggagcagcttgggtgtgtgaatctacttctttgttcaactgtgaattttatggactctaaatacagatcaagcctttctgatgacgtttccatatccaaattgagacgtgcagcaagtataataaacagactgaatttcaaagacttggtatgaaaaaagaatgtaaaatctctcaatacttaaaaaatattgattacatgttgaaataatgttttagatacactgagttaacccaattactaaaattaatttcacctgtttcttttgaacttttttaacgcggctaaaaaataataataataataattaagatttctactggacagcccggggtctgagatgttactcactcactagaacaggaagggctttaaatatctctgaccacttccaggacaacaaacagatacaaagagagcatttaaacaagactccctcatctgactgggccaagtgcactgaggaaccgatttattcatccgggccactgccttgtcccggggcagccccagcatgtcctcccagcccacagtcaaggccactttccaaaagaacagttcagccgcagcatgcagaagcctcgaggccgcatgtgatgggagggaggccacccggatccccccttgaagagctggagcccccagctcagggaagttcccatcacacatccagtctgcccagcaagcgctttactgtcaatgcttaaaaataggcacttatccagaagatataaaggacccggtcaagcaaagtggctcgcgcctgtaatcccagcactttgggaagtctaggtgggcggatcgcttgagctcagaagttcaagaccagcctgggcaacatggcaagacctcatctctacaaaaatacaaaaattagccaggtatggtggtgcacacctgtggtcccagtcactcagaaggctgaggtgggaggattgcttgaggggagaggtggagtctgcaatgagctgttattacaccactgttctccagcctgggtgacagagtgagaccctgtttcaaaaaaaaacaaaaacaaagacaaaaaactcttacaactcaaaaagaaaaacaacccaaatcaaatacgggcaaagagcttgaatagacgtatcttcaaaacaggatatacaaatggccaataagcacatgaaaagatgctcaacttcattaatcatcagggaaaggtgaatcaaaaccacctacaaataccatttcacacccacagggatggctatcagtaaaaacagacaaaaaacaggagataacaaatgttgctgaggatgtagagaaattggaatgcttgtgtgttgctagtggcaatataaaatggtttggctgctgtgaaaacagtttggcactccctcaaagaaattaaacatagaattaccatatgacccagcaattccactctaaggtatacagtcatccctcagaactgtgagggattggttccaggacaccctctggataccaaagtctgcagaggctcaaatctctttatataaaatagcagcatttgcagataacctatgcacaccctcccatatacttgaaatcatctctagatcactcatcatgccgaatacaatgcctacacatcactgcattcacgtggattcaacggcccctggcagattcacgttttgccttttagaactctgtggattttttttccaaatgctttctgtttgtggttggttgaattcatggatacggagcccatggatatggagggccaactgtatacccaaaggaattgaaacctggtactcaaacacatacacgcacagccatgttcaaagccgtacttattcacaatagccaagaggtgggaacagcctgcatggccgtcaatggatgaatggataaagtgtgggacagccatacagcagaatgttacttggccgtgaaaaggaatgcagttcttatacatgcaacaacacggatgaactcacaaatacggcagaaagaaggaaagaagcgagacacaaacgtcacgtactatatgactccatttatatgaaactgccagaataggcccatccaccaagacacaatatagatgagtagctgccaggaacagtggcgatggggggaacgggaaacagctgcttactggcacaaggtttccttccggggtgatgaaactgctctggaactagaaggagacggcagtagtacaaccctgtgaatgtactaaatgccactttacttactgtttgctttaaaatcgttaatttcatctcgtgaatttcacctccattcttaaaaaggttggggggatgggggtgcggcggcacttattcactggttgtgccaggaggttttctgatatttggacatacaacggctagccccctctggaatgaatctggttcatccatttagtattcatttaataaatatttagcaagtgctacctccatgctagacgccagacgagaacaaaagcagagccctggtcctgagcttactttcgggtggtagagacacacagacaagtaaacacacatccacatatgtgctacaaaaaagaaaggaacagtgagttagaaaaaagaataaagaagaaccaaactcagatgacaggctttggttaattttagatgtcaacttgactgaattaagaaatacctagaggacctggcacagtggctcatgcctataatcccagcactttgggaggccaaggcgggaggatcgcttgagcccaggagttcgagaccagcctgagcaacatgacaaaaccccatctctacctcccaccaaaaaaaaaaaaagaaagaaagaatgaacgaatgaatagctgggcatggtgacatgcacctgtggtcccagccactcggaaagctgaagtgggaggatcacctgagcccaaggaggtcaaggctgcagtgagctgagattgtaccactgcactccagtctaggtgacagagcgagactccaccacaaagaaaaaagaaaaaaagaacctagagacccggtaaggcattatttctgggtgtgtctatgagggtgtttccagaggacactggcatgtaagtcgggccgaggagggaagactcgccctcagtgtggaccagcaccatccaactggttgggttgcagatgggacaaaaaacagagaaatggccatctgtctctaaagggacaaaaagtcagggagggcaatctctccatctgcctctctccctctgtggccttaggactctggcctcacaccctcagtaccaggctttcgacctcagactgacaattacagcagggtttctctgctgcggaggcgtctgagcttgaggggagctgtgctgccggcaacccagatctccagcttgcaggtggcctgtcacgggacttctcggcctccacaatcacgtgagcctattcccccaataagttccctctcgtatctgggtatctatctatctgtctctcctattgattttgtctggagaaaaaaccccaacaaatacaacaaccaatgggtcaaagaagaaatcactgggagaattagaagatacttttgagataatgaaaacaaaacacaatatatcgaaacatatggaatacagtgtacacagtgctcagagcgaaatgtacagctgtaaacacctacattcaaaaataagagtgacatcaaatcaatgactccttctacaccctaaggaattagaaaaagaactaaactcaaagctaacagaaggaaaagaacagaaataaaatacgcaataaaaggcatagagtgaatcaataaaatcaagttttttctttgaagagatcaactaaattgacaaacctttggctagtatttaaaaaaaagaacataaataacccacatcagaaataaaagtgggaactaccaatcttatagaaattaaaagaattatgagaatactatagacaactatatgccagctagataatgtaaataagacataaccttagaagcaaattactaaaattgaatcaagaagtagggctgggcatggtggctcacgactgtaatcccagcactttgggagaccgaagtgggcggatcatgaagtcaggagatcgagaccatcctggctaacatggtgaaaccctgtctctactaaaaatacaaaaaaaaattagccaggtatggtg[174 bp omitted]ctcaacacattgatatcaagagacggaatcagaaatcaaatacttcccacaaagaaaagtccaagaccagagagttcactgaactccatggaacattcaaagaacaaacaccactcctgctcaaactctaccaaaacttagaagaggagggaatacctcctaactcactttatgagggcggcattaccctgatactaaagccagacaaagataccacaagaaaaccacacagcaatgttccttatgaatacagacacaaaaatccttaacaaaatactagcaaacccaatccaacagcacactaaaaagattatataccataaccaagagggatttatcccaggaatgcaaggcggcagggggttcctacataaaaatccatcagcgtaatacagcacattaataaaaggaagaaaaaatctacatgattttctcattagagacagataagagcatgtgacaaaactcaacacctattcatgatttagaaaaacgtcattcagcaaactagaaaaagaaggtgtgacacggtaagaaatatatatatttggtctctgctcctagtcctggcaccgagctgctaaaacactttctgagagatggtggtgatagaagcctgttttgttttaatattgggtcttagtcctgggttcctgacacaaaggcctctaagatccttgaaatcttggaagtgatacgagcatcttttcgttcgttcatgaggtgtctgctgactgaatgcccctagatagcttcaggatgggggctggttgccaggggaaccaatcatgtgataggtggctggaattttcagccccaccccctgacctcttagggagggcaaaggggctggaaatttagtttaatcaccaatggccaatggtttaatcaatcatgcccacacaatggagtctccataaacaccttacacaaaggggttccgagagcttccaggctggcccgtctgagggcatggaacgtcagcacccttcccacatagcctgccccatgcagcaaggtttggccattactgaatcgcactctttacaacaaaccagtaatggaagtaaaatgttttcctgagttctgtgagccgttatagagaactgttgaacataaggaggggcaacacccgatttatggccggttgagtacaggtggcagtctgggactcgcgactggcatctgaagtgggggctgtcctgtgaaactgggctcttaacctgggagcttgcgctaactccaggtcgtggatgacatcactgaattcaactgcaggacccccaagtggtgtctgtggagaactggagaactgtaatgtctgggaaacccacacagttggtgtcagaaatgttgtgagtggagaacaggtttttccttcttctataagggaatttccttaacctgataaagggcatttacagaaagttcacagctgacatcacactcaatggaaaaaggctggaaactcttcccctgagatcaggaaccacgcgggatgcccaccctctccactgctattcaacactgtgctgcatgttctagccagggcagtaaagcaaggaaaagactttgacgaaagacatccaaactggaacctctatttgcagatgacatgattccatatacagaaaatcccaaagaagccacacacaaaaaaaaaaatcaacaaaagaaaaaaaaaaaacaacaccctactaaagctaataataaattcattaaagctgcagggtacaagatcaatacacaaaaattgtttgtgctgtccagagaggaggtctacaggaaaaacaaaaacaaaatcagctgtgcttctatacacctgcaatgaagaatccaaaaagggaattaggaaagaattccatttacaatag[132 bp omitted]caaaacctcatctctactaaaaatacaaaaattagctgggcgtggtggcacacgtccgtaattccagctactcgggaggctgaggcaggagaatcgcttgaatccaggaggcagaggttgcagtgagccaagatcgtgccactgcactccagcctaggtgatggacagactctgtctcaaaacaaaacaaggcaaaaaaacctaggaataaatttaagcacacaggtaaaagacttatgtatactgaaaactataaaatattgctgaaagaacctaaagacttaattaagtggaaagacattccttgttcatggactgaaaacttaatattgttaagatgtttcaaaaatgactagatacaatagaatccctatcaaaattccaatataattttttgcaaaaatggaaaagtcaaacctcaagttcatatggaatcacaaggggcacagaataaccaaactcatatggaagagggaaaaacaaaacacagagttagaggactcacacttgccaatttcaaaacttcctacaaggctgggcgcgctgactcacacctgtaattccagcattttcggggcccaaggcgaaaggatcg[132 bp omitted]accccatctctactaaaaatgcaaaaaattagccagacacggtggcaggcacctgtaatcccagctattcaggaggctgaggcaggagaatcgcttgaacctgggaggcagaggttgcgatgagccaggatcgtgccactgcactccagcctggacaagagcgaaactctgtctcaaaaagataaataaataaataaataaataaataaataaataaaaagaccagcctgggcaacacaatgggaccccatctctacaaaaataataaaattagctggatgtggtggtgcaggcccgtggttccagctacctgggaggctgaggtgggaggactgcctgagcccaagaggtcaaagctacagtgagccatgattgcaccactgcactccagcctgggtgatagagcaagactctgacaaaaaaagaaaaaaaaggcggggcacggtg[202 bp omitted]gcttgcagtgagccgagatggcgccactgcactctagcctgggcgacagagccagactccgtctcaaaataaaataaaataaaataaaaataaccttcctatacaactacagtcatcaaaacagtatggccagcataagcacagacacgtagaccaatgaaatagaattcagagtccagttttaaaccccaaatctatggccagctgattttcaacaacgctctaacaccactcgatggcgaaagaacagtctcttcagtgaacggtgctgggacacctggaaaaccacatgcaaaagaatactgttagacccccacttcacttcatatatgaaagttcactcgaaaatggatcaactctctacgtataaggactacaactatgaaactggtgtaaataaacatggggcaaatcttcatgacctcatttggcaatggagtcacagatttgacaccaaaggtgtgagcgacaagagaaaacagataaatagaatttcataaacatttaaaacattcatgcaacaagggacattatcagggctgggtgcggcagctcacgcctgtgatcccagctagttgggaggctggggtgggaggactgcttgagcctaggaagtcagggttacagtgaaccaagatcacactactgcactccagcctgggcaacagagtgagaccctgctcaaaaagcagacattatgaagaatgtaaaaaaaaaaaaaaacacctaaaaaaggggaaaagatatttgaaatcacatacccaaaatatttaaaaaacttctataacac[138 bp omitted]atggcgcaaccccatcagtactaaaaatacaaaaattagctgggcgtggcagcgggagtctataattccagctactcgggaggctgagggaggaaaatcacttgaacccaggaggcagaggttgtagtgagccgagatggcgccactgcactccagcctggccaaaagagtgagactccatctcggaaaaaaacaaacaaaaatgggcaatggatatatctagacatttctcgagaaagagatacgtgcagccagcaagcatgtgaaaagacgtgaaacatcacgggtcatcaaggaaatgcaaataaaaacctcaacagttaccgctctataccctagaggatggctataatttttaagaaacagaaaacaagcattgctgaggatctggagaaacaggaaccctcacacattgctggtggacctatgacaggatacagccactggaaaacggcttagcagttcctcagaaagctaaacagaaaattattgtatgagcctgcaattccattcctaggtgtatacacccagaggaactgaaaacgggcactcaaacaagtacaaacacacactcacacacgttcacagcagcactattccccatagcaaatgggtagaaacagcccaaacgtctatccacagatgaatggataaacagaaaatggtatagctgtccgtcattctgtgtagattccatacttttgaatttacctcctcactgaagttcatttgcaaccccaaactgatactgtcagctttcacagtcatttgcagacatgcccagaacagcagaaaggttgagctgcccaacacgcatgttcccagcagatgtcaagcaaggcaacgctgtcgtcttgcttcggaaaaacttcttcacaacacacatgtattactttgcaatcagatgaggccttccaaattctttttccttgagagaaaggagtgatttttctgtaaaaggacatcctaccaacaggtcaaacaaaatgcggcctcagttacgttctaatgcctaacactgcataaagcacaattccttcattatacaggcgatgccatattcaaggtcaagtgcactcgctgaaaaaccctcatgcttatacaagaatagagctgtcggagaaagcaccttttctgctccggtcttagagccacactcgccggcgaagccaaacaacatctttttcatcgcaggaccctcaacctcctttgggccctctgaggtctgaggctccctttctccactgaacttccttgcccagactgactggaaggagccgataccatctcaacaatgaaaggatgaaatgcctactatgtgccacgcgccgggccaagtgctacacctgctgtctccctcttaatcttcctgatgcctgagaagcagacgcagccagaaaccccatcttatggatagacaaactgaggcccagaggagtgtcccactcacggtgacacagccaggctctgagattgaacgctggcgtgtccacctccaaactgcggtctccgcagctctctccctacccagtctggacacaccagcgcctccccaaacccaccccgtcaccaacctctgtttactccttattccacttacctgacctcccaccgaggagtaagccatggctaaccaccaaacgcgagccctggctacaccaggtagaaaaaccaccagcaaacccatgcactatgaccctgtccctaatcgtgttccaaatcctgcagccatgacacactcctatccctggcaccaaaactcatcaagcactgtcattctaggtcatgcctgtctcaggtatttggacaactggtgtgtgtttacaaagagctggttccaatcctagctctgccaacttctgaggcttgaccaagtgactcgggatccaggatctcctccacctgtggacagcacacacaccactgccgctgtgaggaggacctgcatccctggaccttgccgtggggccactggtactcccggtgtaggaccctctacaaccaccccaggaagagagggttcccaggcaatcgggcacatggtacactgaagcggctggcctctgtcctgagagagagggagcgctgcgattctcagcacaggctcatggcagaactccgggcccagctacgcggcttctgcaggaattattcagacaaataaacaccaagaaacatgacttaaaaaaaaaaaaaaaaaaaaacagaaaaactggccatcctccaaaagggctcaatgaaagcacatgctgagatttgaaaaacctgctacatctaaaatgggagaattttactatatgtaaattatacctcgacaaactagacttaaagaaaacatcttaacccaactatgttaccatgggttgctggaagtgcacatgctcctgctgaagggcaccgagggagctggcaccacgcttggggccttccagaggaaccaggcaacaggagctctagaggaacatggggtcccatgccccccatgcaactacatgcccccacaccctaaatgaagcccccaggatcccaaaagagcaggcagggattcagagagggctctctgccctctcgacacccccacacaggggaggatgctgggcccagtagtgacaatcctatggtcaaagggcccccggctccctttatctacagggccaggatgcaagggtggagcttcaggaagtcaggacagaaacagccctggagtctgcatttcagactcagttgagtgctgcaggacacagcaggtaggggcacctgagtggcagccacttagggcccctgctgcactgggtacagtggcaccacacagtatgggtttctgccacacttgggagcggctggcctgcatctcgcctgaagttgcccctactaagcaaggatgacaagcagcaaacagcactggccaggccctgccccacctgcctccgaatccacgggcagcccacggcggagccaggcagcagccggagccccttgcctgagggcactaggaagtagaatggatgccaccagtccccaggtggctgaaggccgtgtcagggaccagacaggtgtctgggaacacagaaaacctcactgagcttgggcacagtggcaagtgcctgtagtcccagctacttgggaggctgaggtgggaggatcgcttgagcctggtaggttgaggatacagtgagctatgattgcaccactgcgctccagcctgggcaaaagagcaagaccttgtctctaaaaacaaaacaaaaaatgccttgctggcccaaactgcttctgaacctcagaggaccttaatctaagtcaccccagaggcgagtttaaactgcccatacagatggtggtcccacagcccacccgctagaataccagtgcctgggctgtggagcacctttgcagatgggctcgagcaatcccctcaaccgccccaagagggggctgctgttctcattccccttccatacgctcaccggatacagctggggagactgggagcccgggcacacacctggcagaggggtggccccataggcccaaaggcagggaccactcacccctcaggaggcccacttgcaggcaggttcggctcttctcccagcggggcctcaattccaacaaagcctcagaatgacctaggtttctgtgaactggaccccgcgcgaggccttgcatctgaaatcggccaagctgcaccggctgaaacgtcacccggctcctaggacggccgcacgccaaatgcctctcctcaaggcccttcgtgccagagggtttgtggaaaagtggaatggcagccacgcagcccggcaccgccaggtacaaaccggggactcagtaaccaagcggggcggcatccacaggcctcccagggacacctccttccccagcgttgcctccatgccgggccagctgcacttgtgggaaagcagccggccatggacaagccacaagccaggaaatgtcaccgctggccctgtggtgacacctgggaggaggagcaggggcaggctctgagttgttttaatcattaggccaaaaaaaaaaaaaaaaagtgaaaaactacagatgaaagaaaagaaaagaaaaccccctggactcccaccacccagatgacccgcgccaacattctggatagagataactcctttttccttcaagtattatatatgtagcttgcttcgttaattctgaaggtcatcaaagattctgcccagaagacgcatcgtaatcggactgtaatcagatatttatgctatttcctgatctcagtcactacacacggcccggttattaaccctctaggaccgtcgaggaagctggccctgacaggggatgtcactgctggcacattttctaggcaactggacaggaggtggcccagcagctcccctagagaagcagaccaagggacacgcccacctgctgtcatgaaaccagccgtgtcctggcccccgacgtccccaggaatggagatggtgaccagcaccccccgcagcactcactggaatgtctgtgcatgggcagcggccagttctctggcctgttttgtgaactgccgtggcacccggagcaggggtccccacagagaggcatcctgcttgctcccctcagggatcctaccttgtttttgaagtgcacctcgatgggcatgatgaagccagcgtaccccgactcctctactttgtaggggggctccttgcacactaaaaagaaaaggaagaaacacacccatcagcctcctgcctgtttcaggcccagctgccagcggcagtaccgcacccctcaaccccaccacctcctcacaggggcttggctggcctctcgggggtggcttttcaggaggttaagcccccgacaggattgacttccacggcaaagttatcttaggaataaaacagcagggaagaagaggagaaaggagacttggccaccggcatggtcagcagagagtgagaaggaacgttagcctgtcatcgggatacttgctcctgcagaggatgaggaggctgaggccagagaaggctgcacaagtttgcccgactcaggtggatgtcggtaagcgtgacctgggtgaggtgtgaaacccagcagggagggccacacactctactgtcaccacctccagcacgggggctgagcacctgctgcaccacggacacatgcactgggagacaggggagccccaggtggctgggaccctcctcctgggttctagtttagcacctaataagagcattcccaagtgacgcaaacaaaaccccattgaccccagagattaaaaaagaaaaaaaaaaggccggacacggtggctcacacctgtaatcccagcactttgggaggccaaggcaggcggatcacttcaagtcaggagttcgagaccagcctggccaacatgatgaaactccgtctctaataaaaacacaaaaattagctgggcgtggtggcacacacctgtaatcccagctactcaggaagctgaagcaggagaatcgcttgaaccccagaggcagaggttgcagtaagcggagattgtgccactgcactccagcctgggtaacagagcgagactccatttaaaaaattaataaataaacaaagtgcagcatgaggccaggcacctgaatacttaatctgaacctggggaggaaagcggaggcagaacagaggaagggtggcctgtccccagcagaggaggcacgggcatgggcagtggcctgggatttgctctcagactccacccatgcctcgtcttctccccactcgcccatagtctgaatcccacccagccacaaaggcccacagcagggccacctccttcgagaaacagaccccatgtccctctgcctctgacctccaggtcacgtgcttcccaaatcgactgtcacatcttatctcatggtccccacgccttcaagaaggaatcctgtcctgtgacgggtactccaagcctgaagaacttctatccccccagacagcgccaagagggatggcagttggccgagtgcttcaattcaaccaggggagaacagggagacgcaccggcccactctcctgcctgagagcccacaggaagcaagaggacaggaataaggccgtgagagtgaaggcaggagggaggagattcaagccacctgccagtttctgaaaggcagaagtcggacgaggacacgatgggcaaggggcaggacaaggaggcgacggctcagagtctgccatgggggcgccgcagggcagggacagccactggtgccagaaggctgaaggtcctggactggctgagcggagggcaggagtgaggatgaaagctgggggagggaaagggagcacggtgggggaggagggtgggagcaggggagcgactgccactgcggggcctgagcttctccctggggtgacagcaatgttctggaattagacagcagtgatggaatcagtggtcatggccgcacaactatgtgaatatactgaaaacgctaactgtacacattacaagagtgaattttatgatgtgtaaattacatctccataaagcggttattaaaaaaaaacaaaagggcaaactgaaaggctgtgttgggcacaggagccctgggatccctccctcctgcccatcctccttcccgcccattccccctccacccctccccaccccaggaagtttcaggtttccctctggagaaattgagatggttctgtgtctcaaggagccaactatcagggggaagctgaaacttgcagcgtggaaaccagaccccgaggaaggccttactcattaggaaatcaggaggcccgtgagccttcaggcctgtggataggcagaacccaccctcccatcacataacgctcaggagctcccaccaggaggaaagagcccgagcaaacaaataatttggagaccacagagagtttgacaaaaagaaagaaaaaaaataaaaaccaagagtcaatgtcctcagattcaaggagatatatatccaacaaataaaaataagatacttctaaaaggggaaattacagccaggcaccacagctcacacctgtaatcctaggcactctgggaggccgaggtgggaggatcacttgacaccaggagttcaaggccaacctggatgacattctctactaaaaatacaaaaaattagccaggcgtggtggtgcgcacctgtaatcccagctacttgggaggctgaggcacgagaatcacttgcacccaggcggtggaggttgcagtgagccaagatagtgccactgccctccagcctaggtgactgagcgaaactctgttaaaaaaaaaaaaaaaaaaaaatgaggatcccagaaagaaaaaaagagaggaaataaacagatggaaggaaactgtcaaataaatagaaggaaactttcagagctaaaatgaaagacactcaaatgtcacaaaacatagtgaacagcaaaaaaaaaacaaaaaaacaaaaaaacaaaaaaaaacatgatgtcataaagcaagcgtcctaaaaacataaaaacatcctaaatgtttccacagaaaaaaacaggtcacatataatgggatgaggaccgaatggcatcagactttccagaagatactaacacaacgccttcatagcactaagtgatatatactcccaaaatgtttgggagcaggagtgttgtgaatttgggatttttcagactttggaatattcgcattcctctggttcagcatcccaaaaatccaaaatctaaaatgctccagtgagcattttctgagcatcatgtcagcactcaaaaagttttggatcggctgggtgcagtggctcccgcctgtaatcccagtactttgggaggctgaggaaggcgaatcacctgaagtcaggagttcaagaccagcctgaccaacatggagaaaccccatctctaataaaaatacaaaattagcaaggtgaggtggtgcacgcctgtaatcccagctactcgggaggctgaggcaggggaatagcttgaacctgggaggcggaggttgcagtgagccaagatcgcgccattgcactccagcctgggcaacaagagtgaaactctgtttcaacaacaacaacaaaagttttggatcttggccaggtgcaatggctcatgcctgtaatctcagcactttgggaggctgcagcaggcggatcacgaggttaacagattgaggccatcctgaccaacatggtgaaaccctgtctctactaaaaatacaaaaattagccaagggtggtggtgggggcttgtagtcctagctactcaggaggctgag[132 bp omitted]tcacgccggtaatcccagcattttgggaggccaaggcgggaagattttaagcccaagagttcaagaccaacttgggcaacatggtgaaatcccgtctctgcaaaaaataaaaaagttagctgggtatggtggcgggccagtagtctcagctacttgggaggctgaggcaggaggactgcttcagcccaaaggtcaaggctgcagtaagctgtgatcacaacactgcactccagtctgggtggcagaatgagattctgtctccaaaaaaaaaaaaaaaaaaaaagttttggatttcggattttcagcttagggattcttgacctgtaattcccaaaccacaaaactacacccaaccaaccattctactgtgagaagagaataatggcattttcaaacatgctaggactcaaagggtttactgcccacgtcttataaattttttttgtttgtttgtttttttgagacagagtttctctctgtcacccaggctggagtgcagtggtacgacctcagctcactgcaacctctgcctcccaggttcaagcgattttcctgcctcggcctcccgagtagctgggattacaggcatcctcactgcccctggctaactttttgtaattttagtagagatggggtttcaccatgttggccagactggtcttgaactcctgatctcaggtgatccgcctgcctcagcctcccaaagttctgggattacaggcatgagccactgcgcccagccagaaatgtctgaagtaatctcttggaatattacttgagacactgctctaccaaaacaagaaaataaaccaaaacacaggccgataaacaaacctcaggagaacaggagagaaaaggcccagggtagtggctaaaggggtggctggataagagtccgttgtgattagagaaggaaggcacagagaaccagcatgaaacactcagaggactttacaaacaagccagaaagccaggtaaggcggctgacacctgtaaactcagctactcctgaagcagaggcgggaggactgcttgagcccaaggagttggagttcagtctgggcaacacagcgacacccccatctctaaaagaatttttttttttgagacatagtttcgctctgtcgcccaggccggagtgcactggcatgatctcggctcactgcaacctctgcatcctgggttcaagcgattctcctgcctcagcttcccgagtagctgggactaaaggcatgcgccaccacagccggctaatttttttgtatttttagtagagaccgagtttcagcatattggccaggctggtcttgaattcttgacctcaggtgatccacccgtctcggcctcccaaagtgctggcatgaaccaccgcacccggccaaaaaattaaaaaaaaaaaaaaattccacagaataaatgaaatgactgagagaatggggggaaaatgaaggtatgctaaagacacaatgcaaaaaggagaagtaagggggtattccaaaagccacagaccaaatgtgaagcaagctaaaatagggccaaattttaaccaaaaatgaccaaaaagaacccgtttcacacagacctgactttgagccttctctctggagtggcccagagttcaggacatgggaaacagaagctgaatgaagtcctgccgtcccaaccagcctgatggtgacagcgtcaaacatgtcaacgccgcctactgctagttcccaactcttacagtcaatctataatcggggagcgaaggtcttggtcttcgtcaataagcttaacaacgtccattgtagcctcaaaaagaggggtgcagcagggtcaaaaagagacagggtactggtggccttgccctcctcagtggagagtcagaaaacactaacaaaagctgaccaggtgcaagggtccatccagtcatcaaacacttagtaagcacctactgtatccctgcaggcaccgaacatgtagcagcaaacaaaactgacagaaacctctgacttggggtggggagagggatggacaagatgaagaagtcatatgtacgagatgttaagatggtgctaaggagaaaaccaaagcagaaaacaaaaaggctaagaagcatatggctgtgtgggtgtattgggcaacgaaaccgcgattgagcccaggcagccagaggactccctaaaaagggtgacgtgggactcttctgtgaaggatcccaaaggtaaacaggctcacatcatcattcaaagtcacaaagacaaccaacgcaaaagcgagtcactggactattaaaaacttagagaagacagtggataaaaggggtactttgggataaattctaacccttcaagctggtaaatcagtaagtattgtctacatttaaaaaatcaagaaataagaagcaaatgagctggtattaagaggagtccagagagggctaggaagacagccccggggagggaggactaaggaggccaggaacagcaactttgtaccttacatgtttctaccctatttgatttgtgataatgtaagctggggcggaagtaaaagatactttttaagtacctcaagtatcaatccagaggctggagtgctctaagaggttcactccctctctaaagttttattcaatgccacagagtgtgagctggaaatttactttctgatacatttgatggggccgctatctgcctccaggccccacagacagacagcaacaaacagggctcagctactaatttaaaggccgcctgcaaactgacactgaagcctggcatggtggcacatgcctgccaggagctcaagacaagcctgggcaacacgacaaacaaaaaacaaaacaaaacaaaaaactaaaaactaacccttaagagtgagccccactcactaccccaccttccaggtacttggagaaggtgccatgtcaacgtggtggggaacaaaggtgaaatcaacagcctcaaagtggatggaaatcagcgtccggggcccatccctgtgctccagggacagagaaaaggggaggggtgagggggttggtgaagaagtggagtggatgccaccagagaaaggaaagagggcctggtgcaggaggggcagccaggctcctgctctgccaacgtggcacaaaagcagccacaggcaacacctatgcgggcgggcatggccgtgcaccaataaaaacaggctgcactggcagtggccagacccagcccacaggccagcctgcccaccctgctctaagcacaggtagcggcctgccccctggacccgtctccccgtctgcagaagagggctgtggcgagaagaaaacgcgatcctgcgcacgaagcgctggccaggaagtgctcgatagatggcatgtgtccccacgattaggaagcggtttataaacatctgccgctgtcaggagcctccgcggccatcctctaagaggcttagagagggaggaaggaaaaggggaaaaggtgaagactcaggaaaggagaaatgcagagggaaagagaagccgcaggctgagggaatcgcaggtgggcatcccttcagaatgacaagcctctactgctgtcaacgcccatcacttccccactaggctgcaaaccacttacaggctcagggccagggtcctgggtcccgggtcccgggaagctcttgcttcaacctaagcacacccacgcttgtgcacggctcacctcccgtggcccctggagctcccgggacccccgtattgcagggtagaggggtcaccagcccagccagggctcttcccaccctgaagtgcttcctacagaaagtccctcattcctttatcaagacatcacccaagaagcatttatcgaacccctgtgatgtgccgggctccgggcttcacactggcgactcagcggtaagaaaagtagacgcggccccagccctgatggcgctcaccagaccaccacctcactctccgattccccaccacagcctttccctagggctcacttccccaggagggcatccctgatcataaactgggtgacttcctgcctgtgccccgtcacactgcaccctccaggaaggccagggcccccacgccacaggtggagacgctgacagaatacacgactgaggcactcgtgctgaatcaatgacggcctgaggcttgaagggagagggaagacacggaaaagacagtggtgacatgagctccggcattctttctgccccaaatattgggaattcttcacatggcacacaaacaaacataggcccggtcggcaacttcctgatcactcaccagccggctgacttcacctgtcccacccatgccaacctggctgtgctccctggctgcttcccagagcccgggtctaaatcacgacacaacagaccgccaccacctccttcggttcttcctacgactaactcaacagctggaggtgacacggctccagtgcccccacgccgagggacgcaagctggaacctcatggttggaggggtcctgctgctcctgagggaggggtggagcctggccttgggaggagtgaagacagatgggtccgtgctgtgggcactcagggcttgaggccactcaccgcgtctgggcttggggaagctgtcgtgcagccagaagaccaccttctccacgaagtgctggatgtcacattgctcggggccgcggacaaacaccatccagtcgtgagtgaacccctccgtggtgggcttcttgcgcagttgggcgcgatgccccagctctaacctcacctggacggtgcactggaggagagagaggtggggagatgaagtcagcacacgcctccaagcaggggactgtccccttacccacagagaactttcgataaagacccccagcagtgcaatacgctctcaacccagtgagcagcacacagacggcttcctatcgcgccagcaccttgccgcagacgtcccgtgccttctcccctccgtactcccacacagaccccgtgtctcctctcatccaccgcctcatcctcaattccacccgcacagcctcctcaccggtccccagctcagcccagctcactcctgcctcggggccaccacactggcctaggatcctctgctcctgagacttcccacactggcgcctcttgtcactgggctctcagcttgactgtccctctgcagggaagcctcccctgaccaccgatccaaaagcatccaccaccgctcccatcactctatcatagaggatgctcttccgagcactttcactatcaaaagtcatcttgctgatggctgtcggtgtctctgccacctaagcttgttgactccagcattttcattcccaagcacgcatcacagcgcctcccggaggcccctctcctttccctaagtcatcagctacaacactggctttcagtttcaaaagcagaatgggaggttcccaagaagaaggcagaggccagcctgcggccccctggtgaccggtcccaggtggacccgtggcctgggcagcccagctccctccgctgagcacatgtcgtgtctgacactttgctctgaaatacaaggcagctcaggccagttccatgccactgaacacaaagttgcatgccttcaaagcactcttcatacctaggttggccaaaaccaccaacagggaacctacagtaaatatccaccctgctttgtaaaaacctccccagacttttcacagatacggccctgacacccgctatcaaatacaagaatgttacaaaataaagcagcagccaagcgcacacttgcttctaagtgctgagatagccgggagccagccagaccatggcctgagtcccacaccctcccctgacagagccgccctcccgggccccagaccagacagctcccatctgcgcctttccacgccatcgctcggcaactggccaggtgtgtcccagtggctgcaatccctccagtacctgtctcttctttggcatttcgaggccccgttcagaccccgccacctggctgagtgccccggcgcctggccggcttccctccctctccgtccccctctgagctctcagttgtcacgcgatggagccgctggggcaggcagatcctatcgcccccacccccgcccgccatgttaaagctttccacggcttgtcactccctcagaaggaagcccgagccccgcgcacgtcttccacgcgtgtatttcctcaagtctgagacgctcgtctcttttcatgtcctaacccttttgaagtcagagtccagcctgcacacaggcgcacacgtgcacacacagacacagaagctgctcctgagttggtggcgctgtcctggtatctcagagtcccagaactgaggaaatgcaggaaacgcgcacattccagctcaatcctacagccagccccagacacaccaggaacagccaccctatctctcttcatctcttctagtgccgcagcctgggtgccctaagctcgtttcaaaaccctactcatctcaagtcctggctcacacgctgccctgtccagggccctttctggtagccacgctggagaccaaccttgagtccccacagaagcctgtggacagctccacgggagccccttcatcccatcccccgctcctgggttgctgacgcagcccccagggcccctgtgaactctctgagagcagggactacatcttgttcgtcctcttagcctctatcttgaaaccacgggacaggaggcctggacgatgctggattaattaaaccagagagcctctcaggtcagggagttctaaatgctgcttttggagacggcagggccatggtggcagataaggacaggccagttccagcatgtggaagaactggccagagaggctgagggtctgtgcgcacagcaagccaggtataagaaatgaggcggaggcgtgcaatttctatttggcaacttaaaaagtaaactgaaacatgtacatgatacagatgtacaatttttatttgtcaactaaaaattaatttttaaaaggaaagggggcagaggggattcccttggctcaggacgactgtccctctggagttccctgggaaaagagggcagggactccctagggaccaggcacactgcagggggtgcctgggatcaggccggagacaaaagaaataacccgtcgtcataagtggctgacagatatgggaaacggtctcggagtcaaaagcccccggccctctgtgtaaggcctggggtgcaggcagaaaagggcgaatggcaaactaacagcaaccccagcccatgaggaggcaaccagaaggagtggctggaaaaaggggtgaacacagcccaaagccacagaactgacaggacccgagggtggaggacattcaggtaaccccaagatccgggcagcagggacattcacgaccccagtgtgggaagaaagtggggatggacggaagatcaggcgcactcataaacccccggcgctgcggattcatgaggatctcaggtaaaagtacccccaccaaacacacgaggtgagggctgagcaccggcatggcaatactcaggccaagcacgagtgtctgcctgaacaccaccgcattccaacaaacccaaaacaacactgacattagccccgagcggccatgaccaccctctatgcttacacgcctgcgcctctgcctttttcgctagaaaacaggaaggcaacccctgtcccgctgggagcattacaggtgaaaactaaatgtacatatacatcatgggaacagcaccaggatgcgggagaacgacccctgcttctgtggagctgactcccacacaatgacagtgtctcctcggaatcgcttattcactgacccggccactcagacctcggccgacttcccggcatttctgatgacagggagttcctacccagggcacgcaggcggcagagcagttattgtgaaagagtgaaagaccgcggttccactggagagggggaggatggaagcaccagaactccaccgcagtggccaaagtaaacaggaaggttccgaggcagcgatgggtaatctttgcagccggcaggccgggcccaaagtgctgcccaggcgacactgatgccctgggggctggcgccaacttgagcctcaacacccactgttaaggacacaccccagacttggccaacagatgcgaagttcgggtgcccggcctgctgcacccaggggactgtggagcgctgaggggggcactccccggaagggtggaataacagagtctctgctgttgtagtaaaaaaggaatcacagattcagtaagacgctcaagccacgtcaacgggaggcaagaagtggagccccggccaacgcgtttgacttgtcaggtcatgataatttattagcacagctaagccaattccatagccaagggtaaccaccccccttcccccacaccacctggactctttccttggccattaggaccaaagaattgaagctaatcaattagctgtctctctaggaagggtgcctggctgcagaggttaagtgacaggctctccagaatgtcttagagtgaataatctgattggtcagtggctctcccccaactttatcccagcaagttccttcaaggcaccaggaatgcctgctgctgggaggccacttttttggaacctctggaatagacggctggaaatgagccggggggctgtggtctcagggatttccacttccctgcacctctgggaccaccctgacacccactccccaacaaaagcccaggataaaggggaaccttccaggactgtcccggaaagagctgtccgtctcacttctgggaaaccatctgaaagacagcggacggagggatgggcacgagcgctccaagggccatctggggacagttaggcttgggcagagggcctcagctgggacactgccctctctccaggccagctggcagagggcacttggaaccaaagggccaaaatcccaaatcaggcaaaccaggcagcctctcgagggcagcttccccggggctttctcaacgcagcgtgcggttctccccaggtgtgggctacagcggccgccgcctggcaaagagccgcgagccagccttgttccaacagcttcacacaattccttcagccaatgtaccccacttcctgcaagccctgaaggcaggtcttcaacaaccagttcatctgaagatttcccctggtcttctggtgggaattctcaatagatgcccttcctctgggaacttggacttcgcccagtggtggaattacacctggagttcggctactgcatctaattccctcggaggcaacgatcccctcccatcccaggagaggagaacactgaggagtcgtttcccccttcagcctaaattgattttgaggtcctcctgggctgaacacgtgcacgtgtgtgagccacacatgcacaaacaggaagaggtgacgaggcttgggcgatcccatggagcgacggcaacatgagacccaataaaaccccctgcggaatcttctcccgccaagcccagtcggggccctcagtggtaaccactgaattagaatgtaagagatggggaaagacaggtgcccctctgtgacagtcctctgaagcggagagctgcccacccagaaggcaggggcctctcactaacaggtacaccgggtcctggtcccctgactgctggcacactggggctaggggccagcacctccacccctcttctggctccatctgtcctcgtccctctgacccaaggcacaatgacaaagcgatgagaaggcactcaatgaatttctctctggaaactctctaagagtggtgtgtagaccacctggaaatgcaagttcccctttatagggtctgcagattcctggtaagactgactctctgaccacattgtcaggggaggcctgggacagagtatttacgaaccaggggcccacagacgtgtagacagtgtaccggctatctcccacgttctccaggggggagggggaggagccttggtggactttttgaatgtgcacaaccccaatacaggcatctgtcaccagaccaggtgggcctggctgcaaagggactgattcctagttacttgtatttaaccagcagctggcaaagctgagtgcaaaacctcccattacgaaccacaacgggcataaagggaaatgggactctggtccctgccctcaactgcttcacaatataatcactttaggacaaaaaaactggcaggtcagctttccagggagtagcttcagagctgggagcaggtgaggaatctgtcacacctcagccagcaacctgggtaattcggagcttttcgggcaggtttggggagcagccgagttgcaggaggaagagtctacccacccttgcctgctggtaggacttctgagcctgcatttccacatctgtgaaatgggcccctggcatcagaaacaaactttccccgctgaagaacatcgttgtgaggcagctgctctcaaacccaaacctaggagagcatctgcaggaccagcaagcagcaattcgagcgtgggggtgctccctggtccttttgaagaacgtgaccgcccagatgctgacaccacctcccagctccctaggcagccccagtccccgtgacctgctctcaggccctttcccaatctcttttcggcatctgctcagccttatccttgtcacgtcccagtcccctccccccggccccagcccaggaaacaaaccacactccttccagacataacccttaagtgagcagggaactcgctcatccccctgccaaaaaaaatacaaataccacagacaacaccagcacagacttggggcggagggggaatcaaacatgcgggttacggttggggcaaagagaaccagaaaggcattttcctggccataaggaaaagatgtcaatgctgagaagctgggagcccagagcacagtgggaaatcctgcttcttaggggggtctgaaagtcctagagagtaaaagaggaaggcaaaaagagaatcaaagcctcccaaagccagcgactgggcggaaagctgtgctgtttcccactataatgaggcactaacattttgtggcatctggggggctagtgggagcggaagcccgggttctgctcgattcaaagcattttccctgtgccaagagtcccgcagggacactgaccaccaactcacctacttgagtaaaagataccattctctcctgtttccccaggggcctccggctctgtgaggaagggacagaacccttgggcctctctcaaatttgcatgaaagctttgctggggaagctagaatcagactttgggtccaaacacacttccctccaggagcagcttcccttgcaaacacttctgcaaggagggagaccatcaccatcgacggaactttctgcgatgatggaaatgcatctgcattgcccgacagggtggtcagtagctcagtagctcagtaatggtggttactgagtgcttaaaatgtggctggtgcgatggaggaactgaagttgtcattcgagttagtttaaatgtaaatcagccacagatgctggtgactgtggtaccgggcagtgcaaagccagctctctcccacacctgtccacctgagtgagacctttatctccctctgtcgcagaccaggaatgccacccatttccaccatcccacttacataagtgacagccacccagacctccagggttccacacatcacaaggggaacagacacgcttcggcctaggacatctcccccagggactaaggaaggaggaaaggggccataccctatgcctctgtgtgcccagcgggacttgcctggaggtgggcttcattgaaagtggacactaaaggtatatttcatttgggtttttaactcaatacagattggaagcaacaagctctgtcccttcaacggaaatcaactcacaccacgccgtggaaatccaccaatcaactgctgcaaactcttccttacctcttaagaagaaggcagcaacacccaaaccagatgggaagccatgggaactgggtgccagaagcatgagacacctgtctccatgaccctgtgccacaggcgccgagatgggcaggagggaggattcttgccccccacccatgaaaccacacagacagtgccacttcagtggcgccagcagccagggacgccccaacctgccctctctaacggcggagattttggctgccacccccacagccccacaacacctttcctggcctggtgcccctgaaagccagggcagcagaggaggaggaagaaatgatcccatgttgggggccagcaatgcttctgggcttgaggaagaggggtaggggcttgggtattggagaagaggcagcgcagagttgggtaaagggggtgccagggtgcaggaaggcctcgtgtttatgagaaccaacacagaccaatggggaggggccgtccagagcgtttagggaggttggggaacccacccacccaccctgggtttcaactgaggctctaagatcctgggggaaaaaaacagaaaatgaggtggaaggagggagagggtagtggctgaaagagacatcaggactcatcaggctgatgggcgttagatgaagtgggagatcctgaaggcaaaggttgtacaggagactgcaggactgtgacgtgaccaaccagcctgggagggagatctggactggggtcaagtgtggggaagcctaaatcaggatcccaggggcggagagggcccaagctgaggggaacagcaggccatcagtgactcaaaggtctggggaatccaggtcagagaagaaactgctcctggtcctggtctcagagcagagggtctgaaggtgaaagagacagccccgccgggtccgagggagagtgaccagggcctgaaactagaagggggctgaggcggcagggtgggtcaaagaaagaagtctgaaaaagcaagtacaaagagaggggacactccaaacaggcctgagtccctgcagcagaagaccgaaggccagggtcctagggagtcagaggagctcaggccagggctggggttgggagagaaagggatgccctggctgcagccggggcaggatcagacgggagagaaggctcaggtccaggtaggggatgggtggagataaagcttaggctgggccggggttcaaggaagagagacgccgcagagcagggtcccagggggccggggacgcctcatatctgagctgaggttgaagggaagacagacagcaggttggggactctgggagtttgaggcgactcggggacaagggtccagacaggaaaggagacagtgactggccctggacctagagacggaaaggtctactgggcagatccgaggggccccgggaggggtctgaacagggcccagatcccaggaagtgcctggaaggagctctgggccaggctgaagtcccgagagctgtcttgaggtccctaagccgggctggggtccccaggggcgtcccaggtggatgcaggtcggactggcgttccgaggggtctcccgggggtctccgagccaggctggggggtcaccaggggcgtcccaaggggctccgggcccggcccgggtcccgaagggtgtccgaggcgccctggccggggtcgcggatgggggaggggcgcccccgccccacataaaggcccgaggagcggcgggcgcgcacaaagcgggcgggcgggcgcggagcggggaggccgggaccggggagggccgggcgggccggcgggcgggagggggccgggcgggctgcgcaggggcggcgcggccgctcctcacctgattgtccatggctggcgccccgccccgcccccgggccccgcgtcgctcgccgccgccgccgccgccgccgccgctcaacgccgccccgccgccctcattgtctgtcaagcgccgccgccgccgccgccgccgccgatcccggccgcccgctcgcccgccagccccgcggaaccggaaaccaccgccagcccgggtcgcgcaccgatcacgggcccccgccgccgactagggcccgccgcatcgactgacagccacctgggccaatcgacggcgcggacggccgcttgtggcgcgggacttcctgcctggcgggggcctgccgggctgcggccggagggacgaagcccgcagccaatgggaggccgggaccggaggggcgggaggagggagggagggaggcgcgaggcgagcctggcggaggggagcgcgaggtgtgcgccgcacgtggaggggggcgggggcgggacgggcgcgcggcgcctgcgcgctgcggcccgcagggggcgctgcctcgtggctggagcctccagggcgggagcgtcccgggggctggaactgaggttacgggttcgagccctgtggagggatcccccagcccccccggtagggacacttttgtttcctgacctcatgatgctgctatgtaatggaacgagccctgggctctggaactggagattaattttcttttcttttttttttttatgagacacgtctcgctctgtggcctaggctagagtgtactagcacgatctcagctcactgcaacctccacctcccaggttcaagagattctactgcctcagcctcccgagtagctgggattacaggagctcgccattatgcccagctaatttttgtatttttagtagagacggggttttgccatgttggccaggctggtctcgaactcctgacctcaagtgatccgcctgcctcaacctcccaaagtggagattaattttctaatcttgcataatccttggcaaacctggtcagccccttcttcacctttccctgagtctcagtttgtgcatctgtgaaataggttgaagaacagtactgtgtgattcttcatgctaatttgaatgatacaaatttgaaatcgtgctacattcaaatgacccaagagagtcacatgttttcagttagacacgaagaataagttctggcgatccatcacacagcaaggtgactacataataatgtaattttatattttaaaattgctaaaagcggccagatgcggtggctcacgcctgtaatcccaacactttgggaggctgaggggggcggatcacctgaggtcagaagttcaagaccagcctggccaacatggtgaaatcccatctctactaaaaaaatacaaaaattagccgggcgtggtggtgtgtgcctgtaattctagctactcaggaggctgaggcaggagaatcgcctgaaccagggaggcagaggttgcagtgagatgagatcatgccactgcactccagcctgagtgacagagcaagactctgtctcaaaaaagagaaaaaaaagaaaaaaaatgctaaaagtggattttgaatgttctcaccataaataattgataagtatatgtggtgatggatatgtcaattagcctgatttgtttattccataatgtatacatgtaccaaagcatcaaggtgtaccccatacatatatacagttattatttgtcaataaagattttttttttgagatgaggtctctgctggagtgcagtggcacaatcgtggcgcactgtaacctagacctcctgggttcaaacaattctcccacctcagcctctcaagcaactaggactgactgcaggctcatgtcaccacgcccggctagtttggttatttatttatttatagaaagagcgatctcactatgttgcccaagctggtctccaactcctggcctcaggcaatcctcctgccatggcctcccaaagtgctaggactataggcatgagccactgcgccctgaacaaagatataatttttaaagagagaatctcatgttatccacaaaattttaaataatacccatctctcaaaaaactgttttgatttattgaggatcacaaaattttacaatgacctgtaaactgtgtttatgtgggaaataggcataaccccattttttcaggactttataagccacttgtctcttggacattaggacttctgcctgtgatttggggatccttgtgcagttattttaattccttcttgtcattaaaaatcgggttgtcatttacaagaaagaaacaaaccaccccattaaaaagtgggcaaaggacatgaacagacacttctcaaaagaagacatacatgcggccaataagcatatgaaaaacgctcaacatcactgatcattagagaaatgcaaatcaaaaccacaatgagataccatctgacaccagtcggaatggcgattattaaaaagtcaaaaaacaacagatgttgtcaaggttgcagagaaaaaggagcacttttacactgttgatgggagtataaattagttcgaccactgtggaagacagtgtgacgattccttaaagacctagaggcatgaataatgttcaacccagcaatcccattactgggtatatacccagaggaatataaataattttattataaagacacatgcacgcgtatgttcacggcagcattattgacaatagcaaagacgtgaaatcaacctaaatgcccatcagttatagactggataaagaaaatatggtatatatacaccatggaatactatgcagccataaaaaggaatcagatcatgtcctttgcagggacatggatggagttagaagccgtcatcctcagcaaactaacgcaggaacagaaaatccaacaccacatgttctcatgtataagtgggagcttaatgatgagaacacatggtaacatagtggggaacaaaacacactggggcctgtcagggggtgtggtggggggagggacagcatcaggaagaacagctaacaaaggccgggcttaatacctaggtgatgggatgatctgtgcagcaaactgccatggcacacgtttacctatgtaacaaacctgcatatcctgcacatgtatccctgaacttaaaagttggattaaaaataaataacccctctttaaaaaatcagattgttggggcacacgttgttgggatctcctgtgagctgtgtcatgggcaaaaagtgataaaattgtttaaaaacgaagaaaaaattgaggcgggaggatcacctgaggtcaggagttcgagaccagcctggccaacgtagtgaaaccccgtctttactaataatacaaaaattagcctggcatgatggtgggtgcccataatcccagctactcaggaggctgaggcaggaggatcgcttgaacccaggagatggaggttgcagtgagccgagattgcgccactgcactccagcctgggcgacaagagcaaaactctgtctcaaaaaaaaaaaaaaaagaaaagggaaaagaaagaaacagattgttttctcacttaagtgtcagtcaaacatttattagctagtggggccagtgtttgcactgaagaacaaatagcaccagaaaatgagtaactttggaatgaaagtaagtccagataaaaactctaaagaaggtcaggttgctgtcatggtaataccaccatgctttttaatcaagggcaggtggtgctggaaagaaaaaaaaatggagatcatgctgagaaaataagcagtgatttaatgttgataatttttttttttttttttgagacagggtcttgctctgtcacccaggctggagtgcagtggtacaaacacagctcactgcagccttaacctcctgggctgaagcggttctcccactcagcctctcatgtagctgggaacacaggcatgcacctatttagatatgcctatttcccacataaacaccacgcccagctaacttttaaaattttttgtagatggccaggtgcagtggctcacacttgtaatcccagcactttgggagtccaagacaggcgggtcacatgaggtcaggagtttgagaccagcctggccaacatggtgaaaacccatccctactaaaaatataaaaattagctgggtgtggtggcatgtgcctgtaatcccagctactcgggaggctgagacataagaattgcttaaacccgggaggcagaagttgcagtgagctcggagccagattgtgccgctgcactccagcctgggcaacagagtgagactgtgtctcaaaaaaaaaaaaaacaaaaaaaccgtcttgcccaggctggtctcaaactcctgggttcaagcaatcctgctgcctcagcctcccaaagttctgggatgataggtataagccactacaccgggccgtaacggactctcgctctgtcgcccaggctagagtgcagtggcacaatctctgctcactgcaagctccgcctcctgggttcaagccattctcctgcctcagcctcctgagtagctgggattacaggcattcgccacgacgcccggctagtttttttgtatttttggtagagacagggtgtcaacatt[135 bp omitted]agatcagttgctctaagtagtccccaaagcagcagtgtgagcatcacttgggtatgttgctataaatgcacattctggtcttcccccacccttgtttatggaaccagaaattctaagtgtttggacagcagtggcttaaccaaccctacagatggttccaaggctcacctaactttcagaatcactgtcccaggtaaagggacaaaatgggagtcaggggtagccatctatcttttttttttttttcttttttttttttttgagacagagttttgctctgttgtccaggctggagtccagtggcagtctcaattcactgcaacctccacctcccaggctcaagtgttcctcctgcctcagtctcccaagtagccaagaataaaggctcataccaccatgctcagctaatttttgtattttcttttttttgtggagacagagtcttgttatgtttctgagtctggtcttgaattcctgggctcaagtgatccacctgcctcagcctcccaaagtgctgagattacaggcatgagttaccatgcctggccagcatctgtctttgaagaaagcttgcaggaaagaacctttagtctacacttgctacaaatatgagcttctggaactcaatcccctcccccttattcagttgggaaattactgttcacttaggttctaaattgttgggaattttcaaaactgcatcccctgggctcccactggctgaggtggaatactttgaacatcgaaaagaataatggggaagggccgggtgtggtggctcacgcctgtaatcccagccctttgggaggctg[259 bp omitted]caaaaaaaaaagaaaaaaaaagaataatgaggaaggaactgaatgtctactgacacatgagcggataaactaaacatggtttatccatgcaatagaagcttattcaaccttagaaaggaagaaaatagggtgtagtggtgtgcacctgtagtcccagctacttagaaggctgagacaggaggattgcttgagcgcaggagtttgaggctgcagtgggctatgattgcactgatggcagtggctggccatctggactggccaccaccatcttactagctgcagcacagaggaatggccaggactgcatgttccatagatctggcagaagctggtgacaagtgggagccccgccccttctgcattggggtgggagctccctgggtggtgctgcagccactaaagccatggctacagacctgggcattactgggctctcaggcccagaggcaggcaggagccccaccctcccaggtgcagctgcagctgtccaaactgcagctgcagattaggagtccctgcactcctaggggcccgggaaggttccccctgcccttgcaggctcagaaatgtctgcttccactgcttggcttctccctgctgttggtgcccactccatctcaaagcaaagttggggctgagccccagagctgttgcagccaggcagggtgtgcacaaacttggggcagcacagacacaccagccccctgctacctcagccccatctggacttcgggcaccaacgagcataggagggaagccaaagggggggctgagggcagctcagtgctgacctgcatgcgccccttggcacctatagcctgggcaccatcaacagcagcaggaggtagacaggttcctggatggaaggggatgggtccctggtgaggccccaccttcaggccagggagggcctgaaggctaggggctgggctaccagccccatggactggagtggaaacatgtgatgccttttccaggcctgctcatggaccaatcagcatgcattttttcccctctgaggcccataaaagccctgggctcagccaaagctgggcagatatcgggatgaccagcttcagagagcagctaccaactccagggcctcctctctgctgagagctgcagagacgtcgggactaccagctgcagagaggagcaactcactctaaggcctcttctttgctaagagctgggatgaacatgggatgacctgcctgcagagagaagcaactcaccccagggcctccttctgctgagagctgcagggaatgatggcacaacctgcttgcagagaggagctacccactccagggcctcccctctgctgaaagctgggcaagcaatgggacaacctgcccgcagagagaagctacccactccagggcctcctcttcactgagagccacagaaaatgacaggatggactgcctgcagagaggagctacccaatccaaggcctcctctgagctactctgtcgctcaataaagctcctgttcaccttgctcaccctccacttgtccacatacctcattcttcttgggcacaggacaagaattcaggaactgctaaacagcagggctgaaagagctataaaacccacagggctgaaacatgcgccttgccatgttgtgggtgaagagaaggagagaagagctgtggcccttcagggacctaggagctccctgagccagggctgtgactccctctttggaccccagtgtttcctatagtctccaagcttctgagtgccactgcattccctggtggcagctgtggaagctgcttatggtgcacctggtctggccgcagcctctcagagagccagggcccctgccagcacctggagctgtctgctctgctgcagcagctggtgtgcctggctgcatgcagtggccggacctcatgcttgcttgcttgctcacacacccctcgcccctccatgcctggcttgcccttggcaagtgtgagatccaggctagtagtgtgagctgagcacagcctgccaggccgtgtgggtggaatgagcccagtgggcccgagcaaaactcaggcaaaggtgccaccagccacagaggtttccaaccagaaatcaacaccccaaggatcctgcaacatttttgagggctcgtccaggatctgcagaagggtgagtgaaagggtgagtaaaagcagatctgctctttctgtccctttttaggagtccctaaactcaacaatagctaaaatgaaagaaaaacaccaggcctctattagccagttaaaattaactagcagagatgctggacttaaaacatggatgatagccttgctggggaggacactgtcaatccctcatcatcctcaagtgttgagaatgttgggtttgtttcaatcccgtttccttccatgaggtctacctgttacatgggaccagaaggaggtcctggggcaactgagggtatctggctgaggctatgcctcagtgttatccaaaggcccctggactaactcctgaaactcaagtccctaagcgcccattagggtgttgttggcactaggacctccagtctcctatctttctttctttcatggttgtcaaggttcttatctcttcttttttttttttttttttgagatggagtcttgctctgtcgcccaggctggagtgcagtggcatggcatgatcttgactcctgaccttaggtgatccacccaccttgacctcccaaagtgttgagattacaggcatgagccactgcacccagctcctatctcttctttatatacaacattaaatttctgtgcgcacgcgtgtgtgtgtgtgtgtgtgtgtgtgtgtgtttgagacagagccttgctctgtcgcccaggctggagtgcagtggtgtgatcttatctcactgcaacatctgcctccaaagtagttgggatttcaggcatgcaccaccatgcctggctaatttttgtattttaatagagatggggtttcaccatgttgggcaggcttgtcttgaacacctgacctcaggtcatccacctgcctcgccctcccaaagggctgggattacaggtatgagccaccgcatccagcctacaatgttaaatgttaagaatgttgctgcaaaacagagaaattactggatagaatgagcatttggcttagtcatcaaaagtataaaatggaaggttaagagtagcacagatgagcaaagtgtgccttggtatctgtacataattttgtgggaaaaatgttattgtcatttccttggttgccatcttggtgcaaggcaccttgaggcacagaacagaagcatggcctcaggaaggaagcttttctgtaaacacaagggcaaataaatggtccaaggtcccatacatgcaggccttctttgccttgcagggtaatctggacctttgccaacattgtaggattgattcagctgtcctaatggccttctcaggagaagctgcaaggggtaatcccagagaaatagggaagcataccccagaggtacctccagcaggggaatcaatcccctcaactcctccctatccaggttctctctcaagcttgccccggcatagtaatccttgtttaaggcaggtcccagtctcaactgcccaaaaacagatgcctggtgaatatggtcccattgaagttcagttttccttttctctatagaacttaaggcaaatttaaggggagatcttggcaagttttcagatggccctcacaggtatatagagagtttccagaacttaacccaagtatttgagctctcctggaaagatgtcatgttactcttgtttttgtttttgtttgagatggggtctcactctgtcatccaggctggagtgcagtggcactctcttggctcactgcaacctccacctcccaggttcaagtgattctcctgccgcagcctcccaagtagctgggactacaggcatgcaccaccacactggctaatttttatatttttagtagacatggggttttaccatattggccaggctggtctcaaactcttgacctcaagtgatctgcccaccttggtatcccaaagtgctggaattacagccatgagctgcacccggcttcatgttacttttgaatcaaaccctgaccaccactgaaaagcaggccaccctgaaagtggcacagaattttggggatgagctttatatcttatatagggccagggaaggggatgagacttatctgattggaagaatagcagtaccactgaagaaccctaaatgggacctcaatgatgagacaaaagaatggggccaggcgtggtggctcacacctgtaatcccagaactttgggaggctgagatgggcggatcatgaagtcaggagatcaagaccatcttgcccaacatggtgaaaccccatctctactaaaatacaaaaaaaatagccaggcatggtggtgcacacctgtagtcccagctacttgggaggctgaggcagggaatcacttgagcctgggaggcagagattgcagtgagctgagatcatgccactgcactccagcctgatgacagagcaagactctgtctcaaaaaaaaaaaaaaaaaagaaaatggaaaaggaggccaggcacggtggctcacacctgtaatcccagcactttggaaggccgaggtgggcagatcacgaggtcgggagttctagaccagcctgaccaacatggtgaaaccccatctctactaaaaatacaaaaatgaattagccagatgtggtggcacatgcctgtaatcccagctactcaggaggctgaggcaggagaataacttgaacttgggaggtggaggttgcagtgagccgagatcatgccactgcactccagcctcggcgacagagcaagacaccatctcaaaaaaaaaaaaaagaatggaagaggaaacactttcaggtgtgcataccagagggcatacgaaggactaggacaaagcctctcaattacactaagctatccatggtagacagggattaagcgtgagtcccactgccttcctggaaaggctaagagaggccttggtaaaacacacctaagtcctgattgaggagagggacatctgatcctagaggatgagtttatgacacagtcaggccctgatgtcaggagggagcttcagaaacaggctgcagggccagatggtactttggagggcctcctgggagtggtcaccttagactttgctgtgggaacttggaggaagtccagaaaagagagaggagatacggaaaaaaaggcaaaagctctaatacctgccctgaagcttcacggactccatagtccctgagatgcacccgttgtctgctgcaaatgtggcaggccaggccacttcaggagagactgtctgggcagtgcggggaggccacctcaaccctgtctggtttgcagtgggaaccattgtaggggcagcctgtccctggagacacaggttgccgggtccaggaccagacttccagatggtccagaaggacagatggattctagggctcctttcccaagctctgatggttcagaccactattaccatccaggagccctgggttgaagggaggaaggtagccacctcctggactctggagcaggcctttcagttctcctccccaacccaggcccccttcctctcttagcacgactgtaagcagcatctcaggtcttcttccccaccacgccaggagtcaacatagtcttgtgactacagggagcttttctctgtggggttacttttgtttccgttagggagtgtattagttcgttttcatgttgctgataaagacatacccaagcctgggaaggaaaataggtttaacggactcacagttccacatcatgaggagattctccagagtctgagggtcaaaggcgttccagtgatttatttatttatttattttttaagacagagacacgctctgtcacccaggctggagtactgtggcacaatctcaactcactgcaacctcacaatcatggcagaaggagaaaggcacttcttacatggcagaagcaagagagaatgaggaagaagtgaaagcagaaaccctttatgaaaccatcagatctcatgagacttattcactaccatgagaacagtatgggggaaaccatccccatgattcaatgacctcccactgagtctctcccacaacatgtgggaattatgagagtataatttaagatgagatttgggtggagacacagagccaaactgtatcagggaggcaccttattaggtcaggtccccaatttctgggactccctttctctcccttgtttgaggaggacctggcctcacggcttcacctgcttatgatagagaggcagtagaggagcagccccctccagttgctatctgcaatttggcgagggccacatgggactaatttaatgggtccatagacccatctgagtcaccttttttgtcccaagcttcactttaaagtcctgaaatgggacattagacctgaggcagatgacagcaggagttgagaggcacagcccaggtgagcatgactaattcctgccagttagccctcctgcttcatggatggaagcatagataaggtctagggaacccaaaggttaccaacagcagaaggatagggtggtatgtaggtaagtgcgaatattcctacccactaggccttcccgctgcatgggtgaaggttgcactcgcagctatgagtggcacctgcaaaggtcactgggactcaaggatataaggttggaagaggaaaaagagatgcctttttaaaaaaatctccatcacgtaccccaggtattcactggaaagagaggaacaaagggatgtctttcccctctttccagatgggtaagcaaccaatcattttcagcctgcactcctctcaagtgcattctaaattactggaacgcagccgggtgtggtggctcatgcatgtaatcccagcactttgggaggccaaggtgggtggatgacttgaggccaagactttgagaccagcctgaccaacatggcaaaaccccatctctaccgaaaatacaaaaaattagctgggcatggtggcacatgtgcctgtaatcccagctacttgggaggctgaggcaggagaatcacctgaacccaggaggcagaggttgcagtgatctgagattgtgccacagtactccagcctgggtgacagagcatgactctgccaaaaaaaaaaaaaaaaagaagaagaaaagaaaaaagacactggaactcctttgaccctcagactctggagaaaaaaacatttttcctttattcctcctctgttctctcttcacagatgggtaatcacacctctgtaccacaggatactcccctgggatccatcccgcaaactaggaagagtttaatttccccaagcgttaaactgcttggcaatttcttgaggagggacaacttctctttggctgttccccttcacaggactccagggtcaatagggctccatggctcaggggaatggaacccagaagcctgacatgctgacaaaagggtaagagtttttagcagttggacttctggcttctctctctctgtgcaagctggttgtaggaatgacaaaaactgtattctctgcccctccatgagttcaaaagtcagaagtattggccatttggcatggctaaggtcaggtagtaacatattttaaaagatttcctttttttttttgagacagagtcttgttctattggccaggctggagtacagtggtgcaatctcagctcactgcaacctccgtctcccaggctccagcaattctcctgcctcagccttccaagtagctgggattacaggcatgtgccaccatgcccggctaatttttgtaatttttagtggagacagggtttcaccatttggccagactggtctcgaattcctaactgcaggtgatccacctgcctcagtctcccaaaatgctgggattataggcatgagccactgcgcctggcca[135 bp omitted]accgtctccactaaaaatacaaaaaaaattatccaggtgtggtggtggacacctgtagtcccagctactcaggaggctgaggcaaaagaatggcatgaacccatgaggcggagct[132 bp omitted]actataggtatatttaaaaggcctttatgtcgtttatcgttgtagattttgtttttctggaaaaaggtgttttcttttcggtcaactgaacaatttttctccatttttgtcttgccactcttaatgcacacatgaggggttccaggatgacttctggtggcctgggactccttgggaaaaacagaggaggcgccactgatccgttttgggaaaaacctctgttttcctcaggaacttcaggaattacgggcagatggatccctctcaaaatctatttttgtcttccagctatgcctacttattaagccttagaaactacatgttttcctagccctggttctcgaagggctccaccccccggccagtaatccaattaagaaattggcacaagaggctgggcacggtggctcacacctgtaatccaagcactttgggaggccaaggtgggagattcacctgaggccaggagttcgagaccagcctggcagcatagcaaaaccccatctctactaaaaatacaaaaactagccaggtgagttggcgggcgcctgtaatcccagctacttgggaggcagaggcaggaaaatcgcttgaactcaggaggtaaaggttgcagcgagccaagatcatgccacttggacaacagagtgagactctacattccagcttggacaacagagtgagactctgtctaaaaaaaaaaaaaaagaaaaaggaaaaaagaaaaatcttacaactactagtggatctcctgtctgtcatatagttatatatgtgttgtatgtgtgatgtttatataaaagaactctaactgattagcttaaggaaaaataagcacttaggtcaaatattcttgaagaaaaatagaaactgcaatgccttttagttctcatgacttaatcttagagaaataaaaatagtcttaaagattattggtaaaataaaaatgacttcaaaatgtagacatgtggtccaaattatgcagctcagatattaggtttgctaaatgctttaaagtcataaactgcttctttggcttttgaaaactgtttgacttgcctgctttatggtttggtaaggactagggacatagggagctaatcacacccctagatatgctggaaatattcagatcttatctgcacctaggacataattaaaataacttactaggttttcttttttttttttaactaggttttctttttaccaaaaataagaattgctaagagttaccattataacatgtaattgagactcctgaaaatagacttacatgcaaagtatataaggaaagtaaactgtgtctttagttaaagaatataagaaggcatgggaatgtaaatttttgccaaatttagaaatttaaaggattgttttaaattagataagataaagctaagggtttaaacaagttatagaaggtttgtaaaaattaatcttataaaaggaattgtgtgtgtgaatatattgactaaattctttttttttttttttttttttttgagatcactatgtcacccaggctggagtgcagtggcacaatcttggctcactgcaacctccacctcccaggttcaagcgattcttctgcctcagcctccctagtagctgagattacaggtgcatgccaccactcctggctaacttttgtatttttagtagagatgaggttttgccatgttgtccaggctggtctcgaactcctgacctcaagtgatctgcccacctcaactccccaaagtgctgggattacaagcatgagctaccatgctcagtccatattgactaaattcaaaagggtattatttggttttcctgtaagttgaacattggaatggaagcacgatctgctattcttagggcactgatctgcggtttcataataaatgttataagcctttagtatgtttgataggcttcccgaaatcacatttcaacttcaaaattgtcttttctaacccctagcttttggatgctacagaggatccctggagtgtccagggaagaagtagacaggatgatttgacatgtttagctacataggattgccaaaataaggtggtgtttggtctccggtgggttgcatttcagtgaataatgttaatgtgtattccaaaattgtatgggatttctaaagttctgacgtctgagaaagtgttatgaatcataattagggttattatgttaggttattgtagaccacagtggttaccaaatttctttgtcaatcatgattttgactgtgactaccctaggacattttgacattcataggcaattgttgtcttgttttttatgtttgtttgtttttgagatggagtctcgctctgttgcccaggctggagtgcagtggcgtgatcttggctcactgcaagctccgcctcccgggttcacgccattctcctgcctc[222 bp omitted]cctcaagtgcaggtttctgataactttggagattgtgaacaggagttgactgggtgaattgaactaatggaagaccaaagtaatcattcttgattttttgcttggaacattgctgatcccttgttttgtttttcagaatcaaggaagcttttctttccagctattgtagcttttgacatttgtaggagtgaaccaatcagtgatctctgactgcagctcagaagaaactaaagggacagactgtcaaactccaaatggtgatgcaaatggagcctcagacgatgactcccttttactgggagcccttagataggcccccgagggaaaatctgactgccatttttctgaaaacaat[144 bp omitted]ttccccgtctctactaaaaatacaaaaattaaccgggtgtggtgtcacgcgcctgtagtcccagctacttgggtagctgaggtgggagagttgcttgaacccgggaggcagagattgcagtgagccaagattgcaccactgcacttcagcctgggcaacaagagtgaaactccgaaaaaaaaaaaaaaagaatagtcatcatccctaccctaacagcagttagacgtacctcttcagaggggagtttgatggctgtggcagggccaagcaggagtcccgcccctcctgagttgggatgagatctctccaggtgcagctgcagctgcccaaaccacagctgcagagccgggcctcccactccacagagtaaacaggagtcgcacacacccccaatgcagctgcagccacccaaacagaggctgtgtacccaggcatccctgcactcttggggtcccaggaaggtttccctgccctcgcaggcttggaaatgcctgctcccactgcctggcttctccctgctgttggcacccattccagtctcagagcaaagttggggccaagcccaggcactgtcacagcccagctgggtgtgcacatgcttggggcagtggtgacactccagtcccctgctgcctcagccccctctggaccttgggtgctgatgagcataggaaggaagctgagggaggggttgagggcagcttggtgctgacctgcaggtgccccttggcatctatagcctcatcaccacgaacagcagcaggaggcagacaggttcctgggtggaagggggtggatccccggtgaggtcccaccttcaagccagggaggccctgaagcctgggggccaggctgccagtcccacagaccagagtgggaacttgtggtgccttttccaggctgcccatggaccaatcagcatggacttcctcccctctgaggcccatcaaagccctgggctcagccatagctagacagatatagggatgaccagctgcaaagagaagcaacccactccagggcctcctctctgctgagagctgagcacttgacatgacgactagctacagagaggatctacccactccagggcctttttttttttttttctgagctattctgttgctcaataaagctcctcttcaccttgctcaccctccacttgtccgtgtacctcattcttcttgggcgcaggacaagagcttgggacctgccgaatggcaggactggaagagctataacacaaacagggctgaaacacgccccttgcttgccgtgttgatggtaatgagaaggagagaagagctccagcccttcagaaagcctagacctgggagctccctgagccagggcagtgactccctctttgaggcccagcatgaagcttggagtctccaagcttctgggctccaccatggtccctggtggcagccatggacgctacttgtggtgcacctggccaagccgcagccttgcagagagccagtgcccatgccggcacctggagctgctcaccctgctgcagcagccggtgtgtctgactgtgcacaggggctagaccccatgcttgcttgaacacacaccccttgccactccacacctggcacacccttggcaggtgtgggatccaggctggtagcaagagccgagtgtagcctgccaggtcaagtgggcagaatgagcccagtgggcctgagcaaaactcaggcaaagatgccaccagccacagaggtttacagccagaaaagtgacaccatcccaagaattctgcaatggcaccactgcactccaggctgggtaatagagcaagaccttgtatctatgaaccctgaagacattatgctaagtgaaataagccagacacaaaaggacaaatcctgtgtgattccactcctctcctaggagtcaacagaggtccctcaagtcaacagattcatagaaacagaaaataggctggtggatgccaggagcaggggagggtgctggggagtgagtgtttcatggggacagtttcatgctgggaagatgagaaagttctggagatggatgaaagaaagtcaaatgctatacattctcacttataagtggtatctaaataatgtgtacacatgggtgtagagtgtagaatgatagacattgggtgggcggggggggtggatggaaggagagaaagtgatgaaaaattgtataacagatacaaagtatattattcaggtgatggatacacgaaaagccaagaccaccattatgcaatatatgcatgtgacaaactgtacttgtagcccttcaactttttagatttttttttttttttgagacggagtctcgctctgtcacccaggctggagtgcagtggcgcgatctcggctcactgcaagctccacctcccaggttcacgccattgtcttgcctcagcttcccgagtagctggaactacaggcgcccgccactacgcccagctaattttttgtatttttagtagagatggg[146 bp omitted]cgcaatcatagctcactgcagcctcaacctcccgggctcaagcaatcctcccacctcagcctccccagtagctgggaccacaggcatgtgccaccacatccagctaatttttaaaatttttttttgtagagatagggtctccctatgttgcccaggctggtcttgaactccaaagaaagtaacattttggatgttctggtcttgcttttggtccataacggaactgttactgttaatacgttaagtctctaccgccctctagtggttcactttatttgcaccccgggaacaacgttgagtgttccctttttattttgcctagtagacggtccagccctcttttgggtactttttggaattccttttggcctccaacctgtttcctgtaagctcccagtttgctgcctgccacaaaagtacacacacagccacctgttgcaatacacatacataagtatatatttttttgagatggagtctggctctgtcgcccagtctggagtgcagtggtgtgatctcggctcactgcaacctccgcctcctgggttcaagcgattctcctgcctcagcctcccgagtagctgggattacaggtgcccaccaccatgcccggctaaactttgtattcttagtagagatggggtttcaccatgttggccaggctggttttgcactcctaacctcaggtgatccgccaaccttgacctcccaaagtgtggtgaatacagttgtgagccactgtgcctgaccagtgattttcatttccctaacaacaatgatattgagcatcttcatgtgtgcctggagctgctattattattattattattattattattattattattattattttgacagagttttgctcttgtcacccaggctggaatgcagtggcgtgatctcagctcactgcaacctctgcctcctgggttcaagtgattctcctgcctcagcctcctgaatagctgggattacaagtgtgtgccaccacacccggctaattttttgtatttttagtggagacagggtttcaccatgttggccagactggtctcgaactcttgacctcaggtggtctgcccgctttgtcctcccaaagtgctgggattataggcataagcccactgcacccagcatttttttttttgagacagtttcactctgtcgtccagtttggagggcagtggtacaatctcagcttactgcaacctccgccaattgggttcaagcgattcttctgccctagtctcccgagtagctggaatcacaagtgtgtgacaccatgcccagctaattttttgtattttagtagagatggggtttcactatgttgcccaggctggtctcgaactccttatctcaggcaatctactcaccttggcctttcaaagtgctaggattacaagcgtgagccactgctccagcccttttttctttttcttttttttttttttttttcagacagggtctcactctgtcactcaggctggagtgcagtggtgtgatcatggctcactgcagcctcaacctccctggctcatgaagcgatcctcctgcctcagcctcccaagtagctaagaccacaggtgtacaccaccatgcttggctaattcttaatttgtttgtagagacaggttctcgctatgttgcccaggctggtctcaaaaaatcctctcacctcggtctcccaaaacactgggattacaggcatgagccaccaagcccagcctgtgcttggagcttttgagttcacttttaaacttggaaagaaggcagcctagccctcctggtggccgctcccacccatgaagccagccagagggacgaagagagcctggccctggtgacatcatttgaagcctggacccagccaggtctgcagcctggggctgaacttcaaaagtagatatgctggccaggcacagtggctcacgcctataatcccagcactttgggaggctgaggtgggcagatcacctgagctcaggagttccagatcagcctgggcaacatggttaaaccccacctctactaaaaatacaaaaattagctggcatgcttgcatgcacctgcagtcccagctacttaggaggctgaggcagaagaattgtttgaacccagaaggtagaggttgcagtgagccgagattgtgccactgcactccagcctgggtgacagagcaagactctgtctcaaataaacaaacaaaagtacatattgctgattgtccgtttgtgatttcagtcagttggggttgaatattttgtcctttttcaccaacagaccttcctgattaagcggatcacctgaggtcaggagttcaaaaccagcctggccaacatggtaaaaccctgtctctattaaaaatacaaaaattacccgggtatggtggtgggtgcctgtcatcccagctgcttcgggggctgaggcatgagaattgcttgaacccaggaggtggaggttgcagtgagccaagatcgcaccactgcactccagtctaggcaacagagatcctgtctcaaaaaaaaaaaaaagtatatatgctgattgtccatttgtgatttcaggcagttggggttgaatattttgtcctttgtcaccaagagaccttccctgatggagactagg[144 bp omitted]acctgtctctactaaaaatacaaaaaattagtcgggcgtggtggcgggcgcctgtagtcccagctacataggaggctgaggcaggagaatagcgtgaacccgggaggtggagcttgcagtgaaccgagatcacgccactgcactccagcctgggctacaaagtgagattgcgtctcaaaaaaaaaaaaaaaaaaagagttacagactggattgggaggccgaggtgggcagatcatgaggtcaggagttcgagaccaccctggccaatatggtgaaaccccgtctctactgaaaatacaaaaattagccaggcgtggtggcacgtgcctgtaatcccagctactcaggaggctgaggcacaagactcgcttgaaccgggaggcagaggttacccaggcctcttgctcatcggctacgttcatgccccaagaggaggctgtgaggaggggccagcaggagccagaggacagatactggggatagagcgggatttttttttaaatgattttgcactcgggccacataagctggcaaagaagaggaagagccacggggtcaggggaggaggcaggcgcttctctatcctcctccctcagaagattttgtttgttgattctttttttttttttttttgagacagagtcttgctctgttgcccaggctggagtgcagtggcgcaatcttggctcactgcaacctctgtctcccgggttcaagcagttttcctgcctcagcctcccgagtagctgggactacaggcacgtgccaccaagcctggctaatttttttttttttttgagacgcagtctcgctgtatcgcccaggctggagtgcagtggggtgatctcggctcactgcaagctctgcctcccaggttcacgccattcccctgcctcagcctcctgagtagctggaactacaggcgccggccaccatgcctgcctcattttttatatttttagtagagatggggtttcaccacgttagccaggatggtctccatctgctgacctcgagatctgcccacctcagcctcccaaggtgctgggattacaggcgtgagccactgtgctcagccaccctccccaagaagatttttaactgaggttctcaactctttgggtggtcaaacacctcttcaggggctgtcacggaatcacagctcctctcccccaaatacaccaagacacacaacattttgcagatgattttacaagtttacagacatcctcaaccccacctcttcctaccaccatgatccatcctggagccacaagtgaaaaacctctggcttctagaacaagaaaggaagaaggactcggaagcagatgaccaggaatccaagttcagtcccactactgtctcactgtagtgcaaagagctttggaaaaggacggactgggttcaagtccacgatgtgtggccttaggcaagtcacttgccctctctgagccacatctataaaatgagagtattctcatttatctaaagtgatgcactccaggcacctagattgtatgcccaaacacccatcttttgcacacaatgtcaagtggtctgtggacgctgaaacccatccagggaccccagataagaacctcttactatgtgtctaggctggaatgcagtggcacaacctccactttctggactcaagccatcctccacctcagcctcccaagtagctgggactacaggctcatgccaccacacccagctaattttttttaaatttttcatagagaggaggttttgctgtgttgctcatgctggtcttgaactcctgggctcaagcaatcctcccacctcagcctcccaaaatgttgggattacaggcatgagacactgagcctggccaaaagtctttgctgttgctccagcttgaaagctcattcccatcccaggggtttcacacagccattccctctgtccagaatggacttgccctggcttttggtatcgttggttccctcttgtcattaagggctcaactgcaaagtgcactccctggaccacccatgtgatagtgctgctcccagaaccatcatcttccagaatattattgtattttatcttttttagcgcctatcaatggctggaagtgctttgtgtgtgtgtgtttttatttgtttaatatctatatccttcattagggcaaggacgttgtatgtctttgttgtcttggatccccagaggctagcatctgatatatagcaggagcccaatatatgtatgtgtgttgaatgggtgaatgaatgagtagttgaaaagtagatgaatgaaaggatggttgaatgatttggatggataaatgaatggacaaacgaatggctaaatgtgggcgaatggatggatggatggatggatgtagggtaaggtgatggataaataattgggtaaattaatggataaatggcttaataggtggatgaatgaaaggataataaatgatggatgatgatgaataattgataatggatggatggatgaatggatagtttgatggatgattcaatggatggatagatacattaatgaatgaataggtggattaaaggatagataatagaagaaaggcggaatcgttggataaattactggatgggcaaattaaaggatgaatagatgatagttcaatggagagttcaatagatgaatggatggatggatggataaattagtggtggctggatgaatggataaagtattggatgggtgaattaacgggtggatggaaggatggagaaattaatgtgtggatgaattaaaagataggtagatggataaactaatgggtagataaattaaaggatgggtaggtggatggttagatggataaattaatggatggatgaatcaaaggatgggtggatgatgaatggatagaggaataaattaatgggtagatgaattaaagggtgggtggatgaatgaataaattaatggtagatgaatgaatgaatggatgaataaattatggggcagatgaattaaaggatgagtgggtggctggatgtttgtcaaactctatgctaaggacttcacacacattcatttgttttaaccacacaaaaacccccacaagacaaggaatattatttctgttttacagacaatgtccttgagcttctgaggcaggaaaaatcacttccccaagattgtacaactagaaaatggtggagcaggaattctaacttaggtctgcctgactccaggccccgtgctcttaaccaccatgaaaacagaccttccccaccactccaccactgctttagagactatcctggctaccctcgctcctctctcatgtccacatgcccccaaagcacccagactgcccagtctgggactctgctgttctcagctgtgaacctgaggacctcacaagtccgtgggaggagatgagtgggtctgcatgtaacatctccacatgcacatgtggatgtagaatgaggtgcctggaagtcatgttcattctctggggtgtcccccaagagccagggacattgccatggccagagacagatgagggagtctggtagtgaccaccaatatttagaagctaatatttatttatttatttattattttttgagatggagtctctctcttgttgcccaggctggagtgcaatggcatgatctcagctcactgcaacctctgcctcctgggttcaagcgattctcctgcctcagcctcccaagtagctgagattacaggcatgcaccaccacgcccggctaatttttgtatttttagtagaggcggggttttgccatgttggccaggctagtcttgaacttctgacctcaggtgatccacccacctcggcctcccaaagtgctgggattataggcgtgagccaccgttcccagcctagaagctaatatttagatgccacatccttcagtcaccccagtacctggtgacacagtcccaccagctcatgtgacaatggtcactgggaggctgtggacacagaggaggaaatgaaagaggatggggggggtcatggaggggagatgcacgagacagccccccacagtcaccaggctgctgctcagagatgtcacaaagtccatcatctgcctcaaggcagggcagcgcaggacaaggaggacacggaaggggaaacagaggaaggaaccacgagtgtcccgcaggtgcaagtcctgaccggggctatcttctcaagacacaggcaagttgttgggtggttggatagtcaagaggctggcaggtctcagcagtccttgtcatcaccccggatttccacgtagggcagccccacgggccaactgtcccgaggccagtagcggactttgagggtttcacctggcatctcatagttggcatccaccaaggccatggtgaccatgccataagggaaggtgatgctgatgagcacatgcctgtggagtgcagggcgaaggtggcgagggcacaagatacccacagcctcacgccggccctctttttacttctcatggctcttgaccatccatccaggggagccttctgggtctggccccgtgactgcagccttcccctaccgccaggtcccagtgtctggctctcctctctctgcttctccaaccccagcccccaggtgcctactccgagctttggcatctaagattctctgactctgggccccccacagcctcagagcatgtgcttaccagatgctgtgcagatagaagaaatgaatcctctgccagaagctgcaaagcagacggtcactgatccagctggtcagagcaacagcccataaaaccacggagacctcaatcaggtgccgaagctccttattgctggtcctagagaggggagagggggaccaggggctggctcggagagcagcacctgatggggctgatgggaaattcctccttccacagtgatgaggctcagaggttgggagaagggaaagagcaggaattgagggtgcaagcagagggggcccaatctcgtgcttagaactaacacagcatttccagcacaacaggtgcagttccaaatgtccttcaagccaggcatagtagctcatgcctgtaatcccagcactttgggaggctgaggttgggaggatcgcttgagccctggagtttaagaccagcctgggcaaaatagcaagaccccatctctaaaaaaaaaaaaaaaagttaaaattagccaggcatgatggtgcatgcctgcagttccggttactcgggaggctgaggcaagaggatcatttgagcccaggagtgcaaggctgcagtgagccgtgattgcgccgctgcactccggcctgggtgacagagtaagaccctgtcttaaaaaacaataataggccgggcgtgatggctcacacctgtaatcccagaagtctgggaggctgaggcaggtgaatcacttcaggccagaagtttgagaccagcttggccaacatggtgaaactctgactctactaaaaatacaaaaaaaaaattagccggccatggtggtggccgcctgtaatcccagctacttgggaggctgagccacttgaacccaagaggcggaggttgcaatgagccgggattgcgccactgcacgccagcctgggtgacagagtgagactccatcttaaataaataaataaataaataaaaacaagtaacaataata[136 bp omitted]actctgtctctactaaaaatacaaaaattagccgggcgtggtggcgtgtgtctgtaatttcagctactcaggaggctaaggcacaagagtcgcttgaacccaggaggtggagattgcagtgagccgggatcgcaccattgcactccagcctgggcgacaagagtgagactccgtctcaaaaaaaaaaaaaaaaaaaagatattaactcagtcctcacaaggactttgtagaggagtaaattgaggcacagggattgcactatgccccaccccaccccatggttacacagctggtaagtggcagagctgggatctaaaccaagtttttctgactgcatagtatttattcttaaccaacaagccctttggtgcttgtatgttttggggtagaggtatgtgtgcctcaagctctcaaagtgctgggattacaggcatgagccatcatgcccagcaagaataatatattttttgtaatcaggggagttaaattataaaaaaaaattaggggtgaaattgtatgaaatctgggagaaatatgtaacagattgacaaaatgtgggtggttgttgtggctggttagtgggcgtggggaggtttgtggggctattttctctgcttgcatgtctgtttctgggtttcatcataaaaaggacaaactctgctgggcacagtggctcacgcctgtaatctcaacactttgggaggccgaggtgggcagatcacctgaggtcaggagtttgagaccagcctggccaacatgacgaaactccgtctctactaaaaatacaaaaattagccgagcatggtggcatacacctgtactcccagctgctcgggaggctgaggcaggagaatccttgaacccgggaggcagagtttgcagtgagctgagattacaccactgcactccagcctggaagacagagagagactctgtctcaaaaataaataaataaataaataaaataaagataatgtagggtggatgcagtggctcacacctgtaatcccagcactttgggaggctgaggtgggtggatcgcttgagcccaggagttcaagaccagattgggcaacatgacgaaaccctgtttctacaaagaaaaatacaaaaattatcctggcatgatggcatacgcctctagtcccagctacttgggaggctggagtgggaggattgcttgagcctgggaggtggaggttgcagtgagccaagatcacgcccctgcactccagcctgggcaacagagcgaggatccgtctcaagaaaaaaaataataataaggacaaactctgcagtcagtcaggttcaaatcctggccctgctacttgttagtgggtgatcttggagaagggacgtcccctccgcgagcctggagtcaggggtgctaggagggggatgggagcctcctgcccaggcacctgcagccttcactcacttcctgtactcctggcacacgatgtagagaatgtgcagggcaatgctgttgagggcgtaggcgttgaccgtgggccgcaggaaggacagaagggtgctgaccacagtggtgatgaagaccaggcggatgaactgggacctggggaggaaggggctcagctgtaggcgggaagggaggtcctgggattgtaggcatggtcacttggagatcccgtggcccaggtgggtgagaaaaggacaggattctggggagcccagataggctcagaaaagggtcctagccaggcagggcacggtggctcatgtctgtaatcccagcaccttgggaggctgaggtgggcggatcacctgaggtcaggagtttga[133 bp omitted]ctcctgcctcagcctcccaagtagctgggactacaggcgcccgccaccacgcccggctcattttttatatttttactagagacggggtttcaccatgttagccaggatggtctcaatctcctgacctcgtgatccgcccgcctcggcctcccaaagtgctaggattaccggcatgagtcactgcgcctggccctggtgaaatcccatttctgctaaaaatacaaaatttagccaggtgtggtagcagatgcctgtaatcccagctactcaggaggctgaggcacgagaattgcttgaaccaggaggcagaggtttcagtgggccaagatcacgccacggcactccagcctgggtgacagagggagattctgtctcaaaaacgacaacaagaaaaagggtcctagcccggcacggtggctcgtgactgtaatcccagcaatttgggaggctgaggtgggaggattgcttgagctcaggagttcgagaccagcctgggcaacatggcaaaaccctgtctctaccaaaaatacaaaaaactagctggatgtggtggcatgtgcctgtaatctcagctactaaagaggctgaggcagggatcgcttgagcctgggaattggaggttgcagcaagctaagattgcgccactgcactccagcctgggggacacagcgagacttcatctaaaaaaaaaaaaaaaaagaagaaggagaaggagaagaagaaggtcctgaggctcccaagtggactcagcagaaagtctcagggagcccaggtgagcccaggcagcgtctaaagggggatcccagggaggactcagtaggatgagaagagggtcccagggagcctgggagagcgtgatggtttccagggcccaggtgaggtcaggcaaggagttcaggggatcccagctgggctgagaagagggatccctgggtccgggtgaatttaagagatgtcagacagtggctctccaggacccagtagggataaaggaaagatgacaggggtcccagaggtcaatagggtgggctgggggggtcctggagggctcaggtgggttaagccgggttagaagagaatttcacttgcctgtaatcccagcactttgggaggccaaggcaggtggatcacttgagatcaggagatcgagaccagcctggccaacatggtgaaaccgtctctactaaaaatacaaaaattagccgggtgtggtggcaggtgcctgtaatcccagctactcgggaggctgaggcaggaggatcacttgaaccctgaaggcagaggctgcagtgagccgagatcgcaccactgcactccagtgtgggtgacagagcgagactctgtctcaaaaaggaagaagaaggaggaggaggaggaggaagaaaaagaagaaggaggaggcggagaagaagaaggagaaggagaaggaggaggaggagaagaagaagaagaaggagaaggaggaggagaaggaggaggagaaggaggaggaggtggaaaagtagaaggagaaggagattatttcacaggggtcaagggtgggagtggggatcaattagatcaagagagggacccagggggtctaagcagatcagatgaaagatgccaggaacgccaggtgagaggctcggggaggagtccctcaggcccaggtaagtgtagacatgaggtcctggaactcctgttggctgcaacagattctggaggaagtcccaggttatcaaagtaggatcaagggagggattccaagaaaccaggtaagctcaggggaggggtctccagaagcccaagtgagtcaggcagggtcaggagaaaacccgaagtggtcaggggaggaattccaagggccccaaagagggtcaagggtggggacccaggggactcaggtgagctcatgtagagtcaactgaagactcagaccccaccctgtccagatggccagcccctgacccacctgttccccccaaggaaggaggggaaatagcagcggggcatccatatgctatagccactgcccaggagccacaggatggcgatctcgtccagcagctggcccaggaagctgagcgtcatgtggaaatacatggagaacaggcctgcagcggcaagggcaggcggtcagtggggtccgccacctcctaaacccccactgcctcccgactgtcacagacctgaaccacacctccctacctatgatcatgaagaggacccagacaacgtaaatgtagcgggagcgcttctgggcatacgggtgcatcaggagcatcatcagtggcccgaagatgaagaaggggatattggagaactggagcagagagagccatagggaggagctcgtcagataggggagacggaggaggctgccctctgtccagacactcagtcaccagccagtcggttacctgctgcatttcaggcaatgcatcaacccaggatttgtcaatcactcacctgtcaacctttcagccgaccctttttttttttttttttttagatggagtcttggagtcttgctctgtcactcaggctggagcgcagtggtgccatctcagctcactgcaacctccacctcccaggttcgagcgattctcctgtctcagactcccgagtagctgggattaaaggcacgtgccaccacgcccagctaattttttatatttttggtagagacagggtttcaccatgttggccaggctgctcttgaactcctgacctcaggtgatccgcccatcttggcctccccaaagtggtgggattacaggtgtgagccaccgcacctagccacttttcagctgatcttgaccatcagctggtcatccatagatcaatttctcgatccgttattggttcattcattcattcagtgagtgtggcaaagactatccactaaacttccatatatattctccttctcttttactttttctatttatttattttacagtcaggatcttgctgtctgctgccaggctggagtgcagtggtgggatcatggctcattgcagcctcaatcagctgagctcagaggatcctcctgcctcagcctcccgagtagctgggactacaggtgcccgccaccccacctggctaattttcttttattttttgtagagaaggggtctcactatgtcacccaggctggttgcaagctcccagcctcaagtgatcctcccaccatagcctaaagtgttgaaattacaggtatgaaccactgcacccagccccttttcctgtaaaaatagtatctcccaagtttgaactgggcacacagcttacccagtgaaagactacatttcccagccttcgctgcagttcactgtggccttgtggccttttgacctgctctggccaatgagataagaatgtaaatgacatctactacttccaggtcagtcctttcaaaaaccacgtaaggaaagcttgccccctttcctcttcctgtgggctgaaatgtggccatggatgtcatgagttgaccttgcccttgcagacaaggaaagacgatgcagtacctttttgacaaacagcatgaagcagaaatgatactgtgtgacttctgaggttaggtcataaaaggaactgtggcttccacctttctctatctcataggacaagacgtccagatcctaggccaccacacaagaagactggctacccttgaagccaccacgctggagaaaccatgtgtagagaccacactgagatggagagagatgccagaggagggccagtggttcaattcttccctat[137 bp omitted]catagtgaaactctacaaaacagtatgtaaatatatattgtgaatatatatatatatataatatgtgaatatatatttcacaataatgtaaaacaatacaaaaattggccaggtgcagtggatcacacctgtaatcctagcactttgggaggctgaggcaggcagatcacttgaggtcaggagtttgaaaccagccagggcaacatggtgaaatcccatctctactaaaatacaaaaaaatagctgggtgtagtggtgggtgcctgtaatcccagctacttgggaggctgaggtgggagaattgcttaaactcaggaggcagaggtggtagtgagccgagatcacgccatcgcactccagcctgggcaacagactaagacttcacctcaaaaaaaaaaaaaaaaggtcacaagaacatttgcacccaaaattaaatgactcaagaccccgacgtgctgacatcagactttgactccccacaaagtgtctccctgatatgtctgagccgcgacaagtctctcatatgacaaatacttatataatatgggtggaaatgtaaatgggtacaacctctacggaaaacagtatgcagaattttcaaagaactaaaattaggactaccatttgatccagcaatcccgctactgagtatctacccaaaggaaacgaaatcattatactaaaatatacctgcgttcatatgtttattgcagcactgttcacacaggtgaagatatgaaatcaacccaatgattggataaagaagatgtggtatatatacacaatggaat[137 bp omitted]gcctcctgagtagctgggactgcaggtgcctgccaccacgcccagctaattatttttttgtagtttt[135 bp omitted]tttatttattgagacagggtctctctctgttgccgaggctggaatgcagtgacacgatcatgggtcactgcagcttcgacatcccaggttcaagtaatcctcccacctcagccctccaagtagctgggactacaagcatgcaccaccatgtccagctaatttttgttttgttttgttttgttttttgagacagagtctcactccgtcgcccaggctggagtacagtggcgcgatctcggctcactgcaagctccgcctcccgggttcatgccattctcctgactcagcctccccagcagctgggactacaggtgcacgccgccacacctggctaattttttgtatttttagtagaggcggagtttcaccgtgttagtcaggatggtctcgatctcctgatcctgtgatccaccctcctcggcttcccaaagtgctgggattacaggcttgagccaccacggccagcctaatttttgtattttttgtacagatgggatttggccatgtggcccaggctggtctctaactccaggactcaagcaatccacccgccttggcctcccaaactgctgggattacaggcatgagccaccacacctggcctggaatactatttagccattaaaaaaagaatgagcccaggtgtggtgactcacacctgtaatctcagcacttggggaggttgagacaggcaaatcacgaagtcaggaattcgagaccagcctggccaacatggtgaaaccccatctctacaaaaaatacaagaattagccaggcatggtggtgtgtgcctgtgagtccagctactcgggaggctgaggcaggagaatcacttgaatctgggagacagaggttgcagtgagctgagattgttgcactgcactccagcctgggtgagagaacgagactccgtctcaaaaaaagaaaaaagaatgaaataggccaggtgtgatggttcatgcctgtgattccagcaatttgggaggctgaggcaggagaattgcctgaggacaagagttcgcaaccagcctgggcaacatagtgagaccccacctccataaaaaataaatttagaaaattagccaaacatactggcatgtgcctgtagtcttaactacttgagaggctgaggaggaaagattgcttgagcacaggagttggaggctgcaggagctgtgattgtgccacttcactccaacctgggtgacagagtgaaaccctgtctcacacacacacacaaagaatgaaatgcctttgcggcaacatggatggaaccggaggacatgatcttaagtgaaacaactcagaaacagaaaatcaaatatcgggccgggcgcggtggcttgcacctgtaatcccagcactttgggaggtggaggtgagtggatcatgagaccaagagttcgagaccagcctggccaacatggtgaaaccttgcctctactaaagatacaaaaaattagccgagcatggtggtgcatgcctataatcccagctactccagaggctgagacaggacaatcgcttgaatccaggaggcagaggttgcaatgagccgagatcgcaccactgcacaccagtctgggcgacagagcgagactccctctcaaaaaaaaaaaaaaaagaggtcagacttcaccaccacacaatacatacatgtaacaaaactgcacttgtacttcttcaatttatacaaacaaaagaaaaacatgaaactgtcacatgagctcagaaacaagtctctttccctccccatctttttttttttttttttttttctgagatggagtctcactctgtcacccaggctggagtgcagtggtgcaatctcggttcactgcaacctccgcatcctgggttcaagcgattctcctgcctca[221 bp omitted]aggtgtggaaagaaaaacaagtgattgatatgaaatggacaatgtcagtaaacagattacgactacagttctggactgcaagcgcttctcttcagtggtccaaggacagatgggacaggggccatgccaacgcctccatgcgcctcttctcagcccgtggccctagttcagttgcctccatttgtgctgatgcacacatactcccaaacaaacacaatgttccctctgcctccaaccaaacaccagcccttgaatatcaacgcgtgcctgaagatactgacccaaccagtctcccagattcaaaagcatccattaaaacgtgtctgggccttcaataaataaagtctaaactcttaaacttggcgtataaattccttccataactcatctctctccaactttttttgttgttgttttgttttttgtttgttagttttgtttttgtgttttttttctttttgagacagagtcttgctctatcacccaggctggaatccagtggggcaatcttggctcactgcaacctccaccgcccgggttcaagcaattctcctgcctcagcctcccgagtagcagggattacaggcactcaccaccatgtatgtctaatttttgtatttttagtagaggcagggtttcatcatattgcccaggctggtctcgaactcctgaacaaagcagatccactcacctcagcctctaaaaatctccatttaaaacatgttcaggctgggcgcggtg[236 bp omitted]agaaaccccatctctactaaaaatacaaaattagccaggtgcggtggcgcatgcctgtaatcccagctactcaggaggctgaggtaggagaatcgcttgaacctgggaggcagaggttgcagtgagctgagatcacacgattgcattccagcctgggtgacatagtgagactctgtccccccaaaataaataaaaaataaaaaataggccaggcacagtggctcatgcctgtaattccagcactttggaaagctcaggcaggcggatcatgaggtcacgagatcgagaccatcctggctaacacagtgaaacaccgtctctactaaaaatacaaaaaaaaaaaaaaaatagctgggtgtggtggcaggcgcctgtagtcccagctacttgggaggctgaggcagaagaatggcgtgaacccgggaggcggaggttgcagtgagctgagatcgtgccactgcactccagcctgcgcaacagagcaagactccgtttcaaaaaaaataaataaataaataaaaataaaattattcctaactcatctctctccaactcaaaaagaaaaagaaaaaaaaaagaaaacaaagatggaaagactagacgggtggtggtgattaagagggtgctcccctgctgcctggccctgtgactaatgcctcttggtttctcttcgcttgtatcagtaaaagcaggacacatcatcaatggtaccttgcaggctgatgcgggccatgcacaagatgaggcattgcagaagtgcattgcccaggatgtggtatgagctcaaaaaatagctggggctgctgctgttgttattgttgaaggagataataataataacaggcctgttatgggtatcgttattccaagcttaggggccagcagagtccagccaggagttatcaacagtgtccctaagcgctcagaaggaggacagagactgtgggtggagatactgactaatgggggaccccgactaatggagtttccgataacatcggaaactgcctggatgccagggtctccctccctgccttccggggctcagcccccacgttccctgcttctcatcccacccaggctctgccaggcgggggagacacctgtctgggatcccatccaaagccagcccagtcctgaactctggacacaagtgagctggaccttcttggtcccagctccagcaggtgacatcacctccctcccttccttcattcattcgttcattcattcattcattcatttgtccaagcatcccttgagtacctactatgtgctcaaggaccataccagtgtctgaaaacaaagtccctgccttctcggggtgtatacagtcaggacagcaggggacctcctgtgcctggttttcctgctcctacttccagaggctgctgtgaggattacagagttaagtgccacgggaccagggagctctgtgtgttttgccccctccccaccctgtatctagaacactctctggcacacagtaggcgcctaatacattttagtagaaaagaatacacataaataatacagaaggggccaggcgcagtggctcatgtctgtaatcccagcactttggaaggctgaggtgggcagatcacttgaggtcaggagttcaagaccagcctggccgacatggagaaaccctgtctttactaaaaatacaaaattagccggtgtggtggtggatgcctgtagtgccagctactcaggaggctgaaacaggagaatcgcttgaacgtggaggctgcagtgagctgagatcgcaccattgcactccaacccctgtgacagagagagattctgtctcaaaaaaaaaaaaaaaaaaggaaagaaagaaaagtttgttgaatacatctccaacatctcctcattcttcgtcctcattgccaaagctcaaactccctcccaccagcaacacctggcctctgtctccagttgaggacagccacctgcattcattccaagtgtgcctgctaatgttggagggacgaagtgtgcaccggccacagcacaagacttaattgcatgaattaaaatgcgtatatctcactctgtcacccaggctggagtgtagcggcgcgatctcggctcactgcaacctctgcctcccaggttcaagcaattctcctgcctcagcctcctgagtagctgggactacaggtgtgtgccaccacacctggctaatttttgtatttttagtagagacggggtttcgctatattggccatgctggtctgaaactcctgacctcaggttatccgcctgcctcagcctcccaaagtgctgggattacaggtgtgagccgctgtgccatccaaaatgcacacaattaattcctaatcaccagtaattaagtggtctcacagcaccatggttaagggagagattctaggaccaggctctttaagaagctgcaacttttgtgcaattgtaatttgcatactgtgtggccctaggaaagaaatataccctctctgagccttgatttccccatctgtaaaatggggagcataattgtacctacttcataggattttatgaggattacagttggtgctaattattcaatgaaatgaataaatacctaataaaattaatgaatgtcactttgacatctctgggtgctgtattcactcgtaataagaatagctacaatgtattcagtgcttaggatgtgccaagagctgtgggttgtttttttttttttaacatccctatttttaaaatcaagacataaatcacatactataaaattcactcttttaaactatgcaattcagtgggtttcagtatattcataaggcatgcaaccatcacactagctaattccagaaaattttctttctttttttttttttgagaccaagtctcactctgtcgcccaggctggagtgcagtggcatgatcttggctcactgcaacctccgcctcttgggttcaagcgattctcctgcctcagccacctgagtagctgggattacaggagcccatcaccatgcttgtctatttatttatttgtatttttagtagagatggggctttgccatcttggcaagactagtcttgaactcctggcctcaactgatccacctgtctcagcctcccaaagtgctgggattacaggtgtgagccaccccatctggccgaaatacattctttaaaaaaagagagtgaatgcatgagtttttcttccttggcacatcccaccgcctggcatcttgtagccttgactttggcttattttcttcttctccatccccagaacatcagccccaccagggcaaggagtttcttgtatttttttctttgtttgttttgttttgttttgtttgagacagagtctcactctgttgcccaggctggggttcagtgcgcaatctcagctcactgcaacctccgccttctgggttcaagcgattcttctgcctcagcctcccaagtagctgggactacagacacgtgccaccacatctggttaatttttaaaattatttttagtagagacggggtttcaccatgttggccaggctggtctcgaactcctgacctcaggtcatctgcccaccacggcctcccaaagtactgggatgacaggtatgagccactgcacccggccggcagggagttttggtgcttggatcactgctgtgtcctcagagcctggagcagagcctggtgctcctgcaattcttgttgaataaagaagaaattgttgtcccaacaactcaaacccctccatcagccccaggatgcttgcagggaagggtcaccaacacctgttttcttcaaaggagaaaggaggtccagaggaacctatcttgcctgggagtatcatgggctagatcactggtttcatgcatgtaattatccaacttacggcatctgccttccctgggtcaacaagatttatatacaaattcatccctaagtcatttgtaattgcaataaaaaatgaataaataaaatagaaactgtaacactgtcacccaggtgcgtggggctgaatacattctagtgaaatattatgcagctatttaaaaggatgcttttgatctaaagatgtaaatgaaagacaaaatatgtagcagaaatatgtagcagctcctatttgacttccaggactcgagcacatcttcttcttctcttctgctgtctttccccaaactcctaccccacttggcaaactcctattcatctttcaaaacccaaccctgggtgcccttttccatgaagcctcccaacacctgggctgactcctcgggtgttttcttctcctgtagccacaaccatgagtgtctgggctctgcaacctcaaccccagactcagctccttgcaaacagagcaacaagaaagcaaaagattcttctttggagaatgatatgatttggctgtgtccccacccaaatgtcatcttaaattgtaactcccacaattcccgtgtgattgaattatcggggtgggtctgtcctgctctgttctcctaatagcgaatgagtctcatgagatctcatggttttaaaaacaggagtttcagccgggcgtggtggctaatgcctgtaatcccagcactttgggagaacaaggtgggtggatcacctgaggtcgggagttcaagaacagcctgaccaacatggagaaaccccatctctactgaaaatacaaaaaattagccaggtgtggtggtgcacacctgtaagcccagctactcaggaggctgagggaggagaatagcttgaaccagggaggcagaggtttcggtgaacggagatcacgccattgcactccagcctgggcaacaagagtgaaactctgtctcaaaacaaacaaacaaaaaacaaaacaggcagggcgcagtggttcacacctgtaatcccagcactttgggaggccaaggcaggcagatcacgaagtcaggagatagagaccatcatggctaacacagtgaaaccccatctctactaaaaatacaaaaaattagctgggcgaggtggcgggtgcctgtagtcccagctacttgggaggctgaggcaggagaatggtgtgaaccctagggggcagagcctgcagtgagcagagatcacgccactgcactccagcctgggtgacagcgagactccgtctcaaaaaaaaaaaagaaaaaaagaaaaaaaaatgggagtttccctgcacaagctctttctctttgcctgctgccatccacgtaagatgtgacttgctcctccttgccttccaccatgattgtgaggcctccccagccacgtggaactgtaagtccattaaacttctttcttttgtaaattgcctagtctctttttcttcttttgcaaactgcccagacataaaggtaagtctttattagcagagtgaaaatgaactaatacagagaagtattttcctgccctcccatcttgcttttggtagggcctggcacaccagaggcgtccagtaattaattgtttttgctgtggatattgataagaaggacagcagaagagggaggcatgagtggatctcacatccatacttgtaatttagagcttatgagacctgccattgtgtgtagctcagagaggggcaggtctcctcctgggtcacacagcattcaggggagagctgggactggaatcccactgcagaagccagcctcaaggagactcaggagaggaggtgaggagagtgttggagatggcagcactgcagactatctcccctccacccccttccgactctgatctcctcatttctctctttttatttttattttttgagaccaagtctcgctgtgtcacccaggctggagtgcagtggtgtgatctcagctcactgcaatctccacctcccagcttcaagcgattctcctgcctcaccctcctaagtagctgggattataggtgtgagccaccacgcctggctatttttgtattttttgtagagatggggtttcaccatgttggccaggctggtctggaactgctgacctcaagtgatctccctgccttggcctcccacagtgctgggattacaggcatgagccaccgcacttggcctctttttaatttttttttagacacagggtctcactctgttgcccaggctggagtgcagtgaagtgatcataactcactgcctccaggacctgggggaccttg[136 bp omitted]accccatctctactaaaaaaaaaaaaatacaaaattaaccgggcgtggtggcacgtgcctgtaattccagctacttgggaggctgaggcaggagaatttcttgaacccgggaggcagagattgcactgttgcactttagtctgggcaacaagagcgaaactccatctcaaaacaaaataaaataaagaaagaaagagaaagagagagaagagagaagaaagaaagagaaagaaggagagaaggaaaggaaggaaggaaggaaggaaagagagagagagaaaggaaggaaggaaggaaggaaggaaggaaggaaggaaggaaggaaggaaggaggaaggaaggaaactctcctaagttgtcatcaacccagaagaaggctgcacctggaggccaccaggccaatgcaagcaggagcaaactgacggagcccacacctggacctcttccccttccctactcgagccgcccctcccacactgctgacttctgttcctgttggatgacccttcctggctctctctgcccatctgccaaatgccaccggttgccccagctgaccccacatcatgactctcctctgttcaaaagccaccccatggctccccagggctctcaggacagagcacacagtcctcagcctgacattcccaatttggcccctgaaaacctttccagtcctttctctcacccttcagtctctcccccatcgactggggagactccccctgggctccgcttcaagctgctcactatttcctgccaggctgtgctgttccacctcaagaccttggccgggtgcagtggctcacgcctgttatcccagcactttgggaggctgaggtgggtggatcacttgaggtcaggagttcaagaccaggctgaccaacaaagtgaaaccctgtctctattaaaaatacaaaaaattagccagccatggtggcaggtgctataatcccagctacttgggaggctgaggcaggagaatcacttgaacctgggaggcagaggttgcagtgagccaagatcgtgccactgcactacagcctgggtgacaaagccagactccgcctcaaaacaagaacaacaacaaagacctttacatatgctattccctttgcctccaaacccttgagctgggcgtggtggctcatgcctgtaatcccagctactctgggggctgagacgggaggactgctggagcccaggagttcaaggctgcagtgagctatgatcacaccgctgtactccaggcagggcaacagagcaagaccctgtcactaaaacaaacaaacaaaattcaaagccttagaggacatctactcattctttttagatttggtttccatggtattgtttgtttttcattgttgtttttgtttttgttttattttgaggcagggtctggttttgtccctcaggctggagtgaagtggtgtgatcatagctcactgcagccttgaactcctgggctcaagcgattcttctgcctcagcctccggagtagctgggaccacaagtgtgcaccaccatgctcagctattttttttttttttttttttttaaagacggagtctcgctctgtagcccaggctggagtgcagtggcaccatctcggctcactgcaagctccgcctcctgggttcacccgccactctcctgcctcagcctcccgagtagctgggaccacaggcgcccaccacaatgcccggctaatttttatatttttagtagagacggggtttcaccgtgttagccaggatggtctcgatctcctgaccttgtgatccgccggcctcggcctcccaaggtgttgggattacaggcgtgagccactgcgcccggcctattttttttttaatcttttgtagtgatggggtcttgctatattgcccaggctggtctgaaactcctgagctcaagtgatcctcctgcctcggcctcctaaagtgctggggttacaggtgtaagccaccacacttgccccccagagcattgttgatgttctttccccattcagcaagcagagaccttatgccccattcctctgacaccccgtttctggcacccccttcctctctccgcctcaagctaaccatggggctgaagaaatctgtttctaattctgggtctcttacaacctggggacaccgagcctcctccctggaatcccaggatcatccagcagcggtgggtttatagcattttgattgaataaatgaatgagtccatcagtgaacacaggatacgtttccaacattctaaccaagcatgcgaaccgttacgtcttcatctctccccacattgtagctacaggaacatactttctcctttctcaatctgaccagctcttctttgacttccagaactgagcacatctttccctgctctcctgctatccttccccacttggcaaactcctattcatctttcaaaacccaactcctacatgtccttttctatgaagtctccaaacacctggggtgagttcttgggtgtttcctgtttctgtaaccctgaccatgagctgctgggctctgcatgctcccaaacagagcagcaagaaagcaggctgggtgcagtggctcatgcctataatgccagcacttttagagattgaggcaggcagatcgcctgaggtcaggagtttgagagcaacctggatgacctggtgaaaccctgtctctgcaaaaaatacaaaaattagctggggatggtggtgcacacctataatcccagcactttgggaggct[134 bp omitted]gaggcaggagaatggtgtgaacccgggaggcggagcttgcagtgagccgagatcaggccactgcactccagcctgggcggcagagcgagactccgtctcaaaataaataaataaataaataataataaaataaaaataaaataaaataaaataaaataaataaacactctttggcctgtgggcaaagttcagcccactgccttgtatcatgtgtcccacaagctaagaatcatgtttacattttcaaatgattgaaaaattaaaagattattttgtgacatgtgaaaattatatgaaat[132 bp omitted]aaaccccatctctactaaaaataacaaaaaatagctgggcatggtggtgctcatctataatcccagctactcgggaggttgagacaggagaattgcttgaacctgggaggcagaggttgtggtgagccaagattgcaccactgcactccagcctgggcgacagagtgagactccatctcaaaaaaaaaaaaaaattattggcatacagccacacccatttatttatctattatctatggctggttttcagctacagtggcatagttgcgtagttgagacagagtctggatggcccagaaagccaaaaatattggccaggcgtggtggctcatggctgtaatcccagtactttgggaggccaaggagggtggatcacctgaggtcaggagttcaagaccagcctgagcaacaaggtgaaaccccatctctactaaaaatacaaaaattagccgggagtggtggcaggtgcctgtagtcccagctacttgggaggctgagacaggaaaattgcttgaaccagggaggtggaggttgcagtgagccaagatcgagattgtaccagtgcactccagcctgggcaacagactgagactccatctcaaaaaaaaaaaaaaaaaaaaaaaaagtcaaaaatatttactagctagccctgtacagaaaaggttggccctgggtgcagtggcttatgtctgtaatcctatcactttgggaagtgaaggcacaaggattacttgagcccagcctggcagcatagcaagaccccatctctatacaaaacaatgtttttttagacagagtctcactctttcgcacaggctggagtgcagtggcaccatctccactcactgcaacctccacctcccaggttcaagcaattctcctgcctcagtcttccaagtagctggaactacggatgcatgccaccatgcctggctaatttttttttttttgtaattttgatagagatggggtttcatcgtgttttccaggctggtcttgaactcctgagcgcaagtgattggcccacctcggccttccaaagtgctgggattacatgtgtgagccactgtgcccagcacccatctgtataaaaatttaaaaattagctgtgtttggtggcatgctcttgtggttccagctactttgaaggctggggcaggaggatcacttaagtccaggaggtcaaggctgcagtgagctatgatggcaccactccatcccaggctgggcaatagagtgagactgtgtctctaaaacaggtaaaataaaaataaaataaaataaacacgaaaagaaaaaatttgccacccactccacccttttgaactgtatgatttattagctatgggtttgggatactcagaagcgttttggaggagaaggtcttggggaagccctttctcacataactctgattctattcctcatcccctgacctgtttggagagaggctttttgatatagaatagaatagaatagaatagaatagaatagaatagaatagaatagaatagatccaggtgtgtttgtaccagggaagggtaagtctcgttttgtgcaacttttgtttctgtatgatacacatctggaaaggcaggtacaggatgatgatgatgtaaaatttctttcataataggtgttctgatcagaggagtttgacaactgcagccttacccggtagctacaggtggctcaatttattttatctggggacaggctacagcagaatccagtggaggacaattttgcctgagataagaacacacagctatactcaggctcaggacacacttgaatcagccctttctaggtgctttttattttttagagacaggatattactctgttgcccaggccggaatacggtggtgcagtaacaggttactgcagcttcaaactcctgaactcaagcaatcctcctgccttagcctaccagctagtttttatttttattttatttttaattttttaatttttaatttttttttttttgagatggagtcttgctctgtcacccaggttggagtgcagtggcgtgatctcagctcactgcaagttccacctaccgggttcacataattctcctgcctcagcctcccgagtagctgggaccacaggcgcccgccaccacgcccagctaatttttttgtatttttagcagagacggg[146 bp omitted]aggctggagtgcaatggcgtgatctcggctcactgcaacctccacctcccagattcaagtgattgtcgtgcctcagcctccccagtagcagggattataggcatgcgccaccatgcccagctaatttttgtatttttagtagagatggggtttc[133 bp omitted]actgggtcttgctatgttgcttaggctggtcttgaacttctggcctcaagtgatcctcctgtctcgaccttccaaagtactaggattaaaggtgagagccaccatacccagcctctcagtgccttctgcaagggctctcatctgggtgcaggatgaaaacagaacactggaccacagtggctgctggggattccagagagaagagctctagagcccttacccatcatctcagcctcgtaggaccaatcattcagctccctcccatgttagaggtgggactactgaggaccgggaaccatatctctggctaaggaagagcaagaatcagtgagaccgtgaggatcctggagtctcataatcccacttcccaggtatgggaagccccggggtgaaaggcaacagggtcagagcaacctgagcctcggactctcctcccagaaaagtctcctggactcaccaagtttaaatcctggctctaataaccagggtgaccctgggcacagccttcaaactccttgaacacctgttttatcacctggaaaatgggatgaagtctgtatcatatagattgcatctaactccccatgtcactgtgcagattaaaggaggtgtttcacgtaaaatgtttagggtcatgcctggtacacagcaagcactttttttttttttttgagatgaggtctcgctctgtcaccaggctggagtgcagtgacacaatcttggctcactgcaacctctgcctcccgggttcaagtgattctcctgccttagcctcctgagtagctgggactacaggcgcccggcaccatgcctggctaattttttgtatttttagcacagacggcattt[262 bp omitted]catggtgaaaccctgtctctactaaaaatacaaaaattagccaggcgtggtggtgggaacctgttatcccaactactcgggaagctgaggcagcagaatggcttgaacgcgggaggcagaggttgcagtgagccgagatcgcgccattacattccagcctaggtgacaaagcgagactccgtttcaaaacaaacaaacaaacaaacaaaagaactaagcactatgcctggatcccatcattcccagggctccaggcaaacacctctgtgttcccagcacccagtatgggcatggcatagctgcactgatctttggctttaagctttggctaaatgccgtgatcatttgtgcattcctatttttttttttttttttgagacgaagtctcgctcttgtccctcaggctggagtgcaatggtgcgatctcggctcattgaaacctccgcctcctgggttcaagccattctcttgcctcagcctcccaagcagctgggattacaggtgcctgccaccaaacctggctaatttttgtatttttagtagagatggggtttcaccatgttggccaggctggtctcgaactcctgacctcaggtgatccactcaccttggcctcgcaaagtgctgtgattacaggcgtgagcctccgcgcccggccttttttttttttttttttttttgagacagggtctccctctgtcacccaggctggagtgcagtggtatgacctcagctcactgcatcctccacttcttgggttcaagaaatcctcccccctcagcctcccaagtagctggaactacaagcacacaccaccacacccagctaatttttaaaaactttttgtagagacagggtcttgctatgttgcccaggctggtctggaactcctgggctcaagcgatcttcctgcctctgcgttccaaattgctggggttacaggcatgagccatggtgctaggtacatccatgattttttagcacttcccatgtggtgttttaacagggaaagagaagaccacctcagaatgtccagaactgaggagtttctcaggaggtgggactttttttcttctttttttgagacagtctcgctttttcacccaggctggagtgcagtggcacaatctcagctcactgcaacctccgcctcctgggttcaagcgattctcatgccgtagcctcctgagtagcttggactacagatgcctgacaccgtacccagctaattttttattttagtagagatgggctttcaccacgttgcccagggcgatctccaactcctgagctcaggcaatccacccaccttggccttccaaagtgctaggattacagacgtgagccaccgcgcccagccaagaggtgaaactttttaaatactgaaaccaggatagtcccaggcacactgggacaagttggtcagtgggtacagctgcaaacaagacagacacaatcacctcttccaggaagcctttcctgattggcccaccccctctagctcaggggcaccctctgcctccccctaccacagctgcctctgtgccctccaagaaggcaccatcgctcccggttgcaaatgcctgcagtcacatcagagttagcttagggaaggcagagaccggttcttttcctggccaccaatgtgtctccaaaacctaccacagagcttggcatcaagtaaagacaagtaaatgaatgaaagctggcactctttggctaacagatgagaaaactagggctgagacaggtgaaccactccagcaagattccccagtaaggctgtatggggaggaaccgggattcgaaccggcatctggcgagactccttcacacacccacgcactcaccgtgttgtagaactcggccaccagctccgagtactggaagttgctctcacaccagtccacctcggagctctgataggcgaagatgctaggcatcttgtctcagtggccaccaccagccggctgcgcccggcagagagaaggcgagcttgggaaggctgggccctgatgaggcggggagaggacagcccggtgccccgcggcaggcagactgggaggaaaaacctgctgggccgctccccagttgcaccagggcagcctggctgtgcagtgacagcagccctgagcataagccgtgggactggcactgtccaggcagggcagggggcagaagtaggcagggaagaggcctcccatccagattacccaggaataggaatcggggtgggggcagtggagggaactgtttttatcttttatgtatgtatgtatttatttattagagtcagggccttgctctgttgctcaggctggggtacagtggcatcatcatagctcaccgcagcctcaaactcccaggctcaagcaatactcctgcctcagcctctgaagtagccaggaccacaggcacatgctgccaccatgcctagctaattgtttttttttttggagacagagtcgctctgttgcccaggctggagtgcagtggcatgatctcagctcactgcaagctctgcctcccgtgttcacgccattctcccgcctcagcctcccgagtagctgggactacaggcgcccaccgc[141 bp omitted]gcccggcctttttttttaaaattgagatgcagtctggctctgtcacccaggctggagtgtagtggcgcaatgtcagctcactgcaacctccacctcctgggttcaagcgattctcctacctcagcctcccaagtagctgggatgactggcacctgccaccatgcccagctaattttttttgtattttagtagagataggatttcaccatgttggtcaagctggtctcgaactcctgacctcaggtgatctgcccaccttggcctcccaaggtgccgggattatacgcatgagccacctcacctggcctgagttcctctactttaagctgtgtgaccttgggcaagtgaatttacctctctgatcctctgtttgctcacctgtcatatggagacgatggtgacagagccaactgtaacaaaggaagacagagataaagcatgtacaaaggcttagcccactgcctatgctagagtaggcacttgatggatggtaatgggttttctttttttttttgagatggagtcttgctctgtcccaaagtgctgggattacagggttttcttactgaagctgaccttgaactttaagtcaactttgtgggaataataataattattattattataataaaagagcctggccttagcaagcggttagcaagtgtgcataacaataataatataattatttattatataatagcaatattatattaaaatataaaattattatattaaaaatactattgttatataatattttaaatattttagtatattattttaatgtgattaatataatttaatataataattaatattatatattatataatttttctttttttaagtgcttgattttcagtattatctcatttaacgttcttttttttttttttttttgagatggagcctcactctgtctcccaggctggagtgcagtggcatgatcttggctcactgcaacctccacctccctagttcaagcaattctcctgcctc[220 bp omitted]ggctcacgcctgtaatcctagtgctttgggagaccaaggcgggaggatcacaaggtcaggagattgagaccatcctggctaacacagtgaaaccccatttctactaaaaatacaaaaaaggtagctgggcgtgatggtgggtgcccatagtcccagctactcaggaggctgaggcaggagaatggcatgaacccaggagacggagcttgcagcgagccaaaattgcaccactgcactccagcctgggtgacagagaaagactctgtctaaaaaaaaaagaaaaaatcctaagcgccaggaactattgttatcccttttctttttcttttttttctttttcttttctttttttttttgaaatagagtttcactcttgtcacccaggctggagtgcaatggcatgatctcagctcactgcaacctctgcctcccaggttccagcgattcccctgcctc[134 bp omitted]cggcttcccaaagtgctgggattacaggcttgagccactgtgcctggcctctttttctcttttgagacagggtcttgctctgttgcccaagctggagtgcagtggcgcaatcatagttcaatgcagccttgcttgatctcctgagctcatgcgatcctatctcctgctagtaatcactagcaaggaaactaaagcccagagaagttaaggaacttaccataggtcacacagttaggaagtgatagagacaggcaaggaacaccacctctatgatgcctcagtttcctcacctgtaaggtggtgaaaatgataatggtactgccctctcaagcctgttgtgaagagttagtgagctgacacgatgtttccataaaaagataaattgtgggctgggcacggtggctcatgcctgtaatcccagcactttaggaagccaaggcaggcggatcacgaggtcaggagatcaagaccatcctggttaacatggtgaaaccccgtctctactaaaaatataaaaacctagccaggcatggtggcgggcgcctgtagtcccagctacttgggaggctgaggcaggaaaatcgcttgaacctgggaggtggaggtagtagtgagccgagatcacgccactgcacttcagcccgggcgacagatcgagaccccgactcaaaaaaaaaaaaaaaaaagaaaaagaaagataaattgtggtgctatgttgccctgcattccaaatcactgaactggccgggcatggtggctcacccctgtaatcccagcactctgggaggctg[134 bp omitted]gaggcaggagaatagcttgaacccagaaaacggaggttgcagtgagccgagattgcaccactgcactccagcctgggcgacagggtgagactccctctcaaaaaaaaaaaaaaaatcactgtggtgtctgaaagtaatcaactttttcaatttccaatatttggagaagagaggctcagtcagtgctaatatgttctatgtctcttaacacttaatgactttgacaaaaaagaaaagaaaagcccttcattaggcaacaatattctgttagaatttagtaacatgatttgtttacattgtatttattttttgataagcttgtattcatggtaagccaaatctactttccattcacggtagggttacaaagtttcctttttttttctttttttttttgagatggcgtttgctctgtcccccaggctggagtgcaatggcatgatctcggctcactgcaacctccacctcccaggttcaaacgattctcttgcctgagccttctgagtagctgggattacaggcgtggaccaccctgcctggccaaagttttctttttctttttcttttcttttctttctttctttcttttttttttttttttttttttttttttttttgagatggagtcttgctctgtcgcccaggctggagtgcagtggctcgatcttggctcactgcaagctccgcctcctgggttcatgccattctcctgcctcagcctcccgagtagctgggactgcaggcacccaccaccaacgcctggctaatttttttgtatttttagtagggacagggtttcaccatgttagccaggatggtctcgatctcccgacctcgtgatccacccacctcggcctcccaaagtgctgggactacaggcgtgagccaccgcgcccagccccagaattttctttttaaaataatattttggcccagtgcagtggcttacacctctaattccaccgctgcactctaacctgggcaaaaagagggaaaccctgtctcaaaaaaaaatagttaattaaataaaataaaaataaaataataaaataaatatgtattttttaagagatggagtcttgctccgtttcctaggctggagggcagtggtaaaatcctagctcacagcaatgtcaatttcctgggctcaagcaatcttctcaccttcgcctcccaagttgctgggagtacaggtatgagctactgtgccctggccaaaataaatgtaagtgttacaattgtggttgtgtttgcacagatctatacatgtgatattattgcatagatttgctcccatttttctgagaaaatgaaaagaaaattgtctaacacatgaatgcatgggaaaagctgttgaaatctgaatatggtctataggtcatatttatatcacctttctggttgtgaaaatgtatagttataaaagaggtaccactgggagaaactggatgaagattacctgggattcttctatattattattgcaggttcctgcaagtttataattattccattttttttaatgtgtttgatagagggtctcactctgctgccaggcttgagtgcagtggtgcaatcacaggccactgcagcctcaacctcctgggctcaagtgatcctcacaccttagcctcccaagtagctgggactacaggccaggcaaattttttctattttttgtagagacaggttctcactatgtctcccagactgctctctaattcccgagctcaagcgatccttccacctcagcctcccaaagtgctagaattacatgtgtgagccaccgcacctggccttaaaatctttttttttttttaagaccgagtctcttcctgtcatccaggctagagtgcaatggtgcaatctcggctcactgcaacctccgcctcctgggttcaaatgattctcctgcttcagcctcccgatagctgggattacaggcgcccaccaccacgtcgggctaatttttacatttttagtagagatggggtttcagcatgttagccaggctggtttggaactcctgacctcaggtgatccgcctgcctcagcctcccaaagtgctgagattacaggcatgagccaccgcacccagcctaaaaatctctttttataaagggattgatttagatttttaattaatacatgaatggataaacacaatgtgtgtggttcatccataccgtggaatattattcagccctgaaaaaggaaggaaattctgatacaggcaacaacgtggatggactttgaggacatcaagctgggtgaaataagccagacataaaaggacaaatcctgtgtgatcccactcctaggaggtccccaaagtcctcagagtcacagagacaggaagtagaacggggggtatgaggggctggggagggggatagggagtgagtgtttcttggggacagagtttcagtttggaaagatgagaaagttctggaggggatggtggtgatggctgcatagacatgcgaatgtgcttaatgccgctgaactatgcatttgatgattaaaatgatcagtttcgtgttatgtatcttttaccacaattttacaaagtaatgatttagggtttttgtttttgttttttgttttttgagatggagtctctctctgttgcccaggctggagtgcagtggtgcgatctcggctcactgcaagctccgcctcccgggttcacgccattctcctg[136 bp omitted]agcctcctaaagtgctgggattacaggcgtgagccaccacgcctggcctgatttaggtttttaaaagaggggtttggggctgggcgtggtggctcacacatgtaatcccagcattttgggagactgaggcaggtggatcacttgaggtcagggttcaagaccagcctggccaacatggtgagacaccgtctctactaaaaataaaaaaaataaaattagccaggcgtggtggtgcgtgcctgtaatcccagctactcgggaggctgaggtacgagaatcacttgagcctgggaggtggaggttgtagtcagccaagatcgcgccactacactccagcctgggcatagagcaagactctgtctccaaaaaaagaaagaaggaaggaaggaaggaaggaaggaaggaaggaaggaaggaaggaaggaaggaaggaaggaaggaaggaaggaaggaaggaagaaaaacagaactaaagcttgacctgactctgtatagcacccctccacaaacatacaccatttagctacagccctagcccccaaatccgcttcccaggtggaccaggagggcaaacagacaccaccactgccaccccagctccccagtagcgaccctgactccttccccatggagtaattttgaaacagtctctgctctgtgtgtgggtggagcagatggtctctgaggcccctttctgctcatagctggaacaggacccagctgctgagatcctgaatcttggcgagggtttaatagcaggcagtaaggtagtgactggcacccacgcccagcccagaccggagaacttgagtgatcatggtgctgactagggaggacagagcagccaggaaggtgggtgggagccgggggagagctcttcccccgctagggggagagaaggggctagagagagggtgacaaacagaggcgtgtgagctctcagcggttattgtaacaaatgccaccaatgtaatggcttagaacagcacacacttatcatcttacctttctacaggtcaggactctgaaatgagtcttataggctaaaggtgtcatcacagctgtgttcctggtggaggctccaggagagacctcgtttcctgccccgtccagtgtctagaggcaacccatgtcctgttctccaccttcacagccacagtgcagcctcttccagtctctctctgactttgttcttttcttttgagacggagtcttgctctgttgcccaggctggagtgcactggcgcgatctcggctcactgtaacctccacctccagggttcaagcaattcttgtggcaggagaatcgcttgaacccaggaggtggaggttgcagtgagccaagatttcgccactgcaaaccagcctgggcaacagagcgagactccatctcaaaaaaaacaacaacaaaaaaccagtctaggcaacataggggaccctgtttctacaaaacattaaaaagttagccagtgggggtacacacgtgtggtcttaacttctcaggaagctgagatgggaagattgcttgagcctaaaggtcgaagttgcagtgagctatgtgtgcaccactgcactccaacctgggccacagagcaagaccttgtctcaaaaaaaaaaaaaagaaaaaaaaagaaaaagaaaaagaaaaaaggaactatacccatcttagcattgggcttttttttgttttcttttgttttgttttgttttgtttttctttttgttttgagatggagtcttgctctgtcacctaggctggagtacaatggtgcagcagcctccactcaccacaacctctgactactgggttcaagcgattctcctaccccagcctcccaaatagctgggattacaggcacccgccaccatgcccggctaattttttttatttttagtagagacgcgggtttcaccaggttggccaggctggtcttgaactcctgacctcataatctgcctgccttggcctcccaaagtgctaggattacaggcgtgagccactgcacccagcagtgttggttttaatacttgctttctatttatttagtagctttccatgtagtggagcaatataaaatttccttttgaagtaaagatatgcattaatatttggaaagtgtttttggaaaatgaacttgtttaaagacagtgtttaagtcaataatggttaccgtacagatggggaaaattttagtctaacaatgcccaaagtcacaaaggacattattgggtaattggtgaaatttgcacatggaatataaagtagataatagtattgtgtccatatttattttctgaagtagataaatgaattctggttgtgtaagagagtatcctagttctttttttttttttttttttttaagatggagtttcactctgttgcccaggctggagtgcagtggcttgatcttggctcactgcaatttctgtttgagttcgagaccagcctgggcaacataggcagactgtgtctctaaaaaaaaataataataatccattttaaaaacaaactatttcagaccgggagtggtggctcacacctgtaatcccagcactttgggaggc[135 bp omitted]gaggcaggagaatggcgtgaacccaggaggtggagcttgcagtgagccaagatcgtgccactgcactccagtctgagcaacagagcaagactcaatctcaaaaaaataaataaataaatacaataaaataaaaacaaactatttcaagataaaaagttgtgggtttgtttgttttgagacggagttttgctcttgttgcccaggctggagtccaatggcatgatctcggctcactgcaacctccacctcccgagatcaagtgattctcctgcctcatcctcccgaatagctgggattacaggcacccgccactgtgcccggctaattttgtatctttagtagagacagggtttctccat[133 bp omitted]tggtgaggatgggaagtgggggagtggtggaaatatgaagaggccaaccactttggaaaataatttgacattacctgaagcattactgggtacagtagttcaactgttagaacaagacaattccacaaatatcagtgtcctaaaagtttacatctcacataagcaaagagtatggagggtgaagctgtcccagaaggctcaggcaagtgggaatttagcaatccaggccccttccttccttctcatgatgcctccatcccagcatgtggcctccatcccaacacgtgacctccatctcaacatgtggcctccactcccaatatgtggcctccactttcaacatgtggcctccatacccatcaagtggcatccatctcaacgtggggcctccactcacaaaatgtgggcttcctcccaacttgtggctctaaatcccaaaatgtgccctttgctcccaacatgtggcctccatacccatcatgtggcccccacctcaacatgtggcctccactaacaaaatgtgggcttcctcccaacttgtggctctcaatcccaacatggctttggtgtacctctattggtcagaactagtcacatgacctccactagatgaaagggttgctgggaaatgtaatctgtagcacagcagccacttcctggtatccactttaccctgtgggaagggagcctgaatctttaaaccacaacaggctgcctccatcacattcagtaaaggtgcaaatgaacatgtcctacaaccagcaactcatctcctggatttatgtccccctgagaaactcccacaaatggacccaggattctggtacaagattattcagagcagccctgcctgcaatagcaaaaccatggaactattcacaaacatccctgagttaaagacttgataagtaggccgggcatggcagctcatgcctgtaatcccaggagctcaagacaggtggatcacctgatgtcaggagttcgagaccagcctagtcaacatagtaaaaccctgtctctactaaaaatacaaaatattagccaggcgacgggaggctgagg[139 bp omitted]gcacctttaattccagctactcaggaggctgaggcatgagaagcgcttgaacccaggaggcagaggttgcagtgagccaagattgtgccattgcactccatcttgggcaacaagagcaaaactccatctcaataaataaataaatttatttatttattaaataaagactcgttaagtaaatagtggattctcctgcctcagcctccctagtagctcggactacaggcacccacaaccatacctggctaatttattgtatttttagtagagacaaggtttcaccatgttggccaggctggtcctgaactcctgacctcaagtgatccgcctgcctcagcctcctaaagtgctgggattacaagcgtgagccaccgcacctggcctgtgtgggtataagttttcaatgcatctaggtaaatacaagggggcacaattgttggattattttgttgtttttttctttaaaccatatatgtatgttatatatcctcttgtgaagatatatttcacaacaatcaatttattttattttattttattttattttatttatttatttgtttatttttttgagatggagtctcgttctgtcatccaggctggagtgcagtggcacgatctcggctcactgcaacctccgcctcccgggttcacaccattctcctgcctc[253 bp omitted]tattggcacacggtcacacccatttgtttgtaagttgtctatggctacttttatgctataatgcagcaatctgcaagctttttgtcacccaggaccagttttgtgcaagacaattttatcacggaggtgtggaatggtttcaggatgattcaagcacattacatttattgttcactatttctattagtattacactgtaatatataatgaactaattatacagctcacataatgtagaatcagggaaagccctccccttgttttcctgaaactagactgtcccagctgggggtgatgggagacagtgacagatcatcaggtattagattctttttttttttttttttcaaatggagtctcactctgtcacccaggctggagtgcagtggtacgatctcagctcactgaaatctcggcctcctgggttcaagcgattctcttgcctcagcctcctgagtcgctgggattacaggcgcgcacgaccatgcccagctaatttttgtattttttgtaaagacagggttttaccatgttgcccagactggtctccaactcctgacctcagatgatccacctgccttggcctcccaaagtgctgggatgacaggcatgagccaccatgcctggcatcatccagctaattttattataataataataataattattattattggaaatggggtctccctatattgcccaggctgctttcaaacacccaggctcaagtgatcctcccacctcagcctcccaagctgctgggattccaggcgtgagccactgtgcctgaccatcacatcatcttccaaggtgggttaattccatgacttactagaagaagggttgccagataaaatacaggacacccagttaaatcagaatttcagattaacgatggataagtttttggcataaatatgttccaaatattgcatatgatcggattatcctaaaaattattcttcatgtatctgaaattcaaatttaaatgagcctcctgtatttttatgtgctaaatctggagactctaatctggaagtatctcttcaactgagcctgtctcattccttcctccaaaaaaaagttcgagaaaagttttcattaagtggcattatgtcatttctactgcctcctctacctaaatccaataacctcaaatgggtattctaaggttattggttattaaccttttatttcactcattcttttctcctcctcctcctcctccccctcctcttcctcctccttcttcttctccttcttcttcttcttttttttcttttctttttttttttttttgagacagggtcttgctctgtcacccaggctggagtgcagtgctgcaatcatagctcactgcagcctcaatctcctggctggagcaatcatcacaccttggcctcccaaaatgctaggataatcctggggcctctctccttggcttctagatggctgtccaccagccatctacatctggtggtcagccaccacccccagccgctgttttccatcagtccattctaaggttcaaaggtttaaaatctgtccatctagctcagaactcagatgtattttcttcaacatcacagcggagattactctggtccagcggggaggaggttctctgcccacccccttctttccttccttcttgaaggctgagaccgaggagggaaaaaaggaaagataaagagggatcttactgttatggcttgaattgtattctctaaaaagatgtgttgcagacagggcatggtgactcacatctataatctccgcactttgggaggccaaggagggagtatcgcttgaggtcaggagtttgagaccaccctggccaacaccacgagtccctgtctctacaaaaaaaaaaaatatatatatatatatatatataaaataataataaaagataagttacagaccccctcgtccctcagaatgtgaccttgcttggaaatagtctctttttcttttcttttctttttcttttttttttttttgagacagaatctcactttgtcatccagactggagtacagtggtgcaatcatagctcactgcagcctcaacctcctgggttcaagccatcctcccacctcagcctcgttagtggtgacgacaggtgtgcaccaccacactcagctaatgtttctgaattttttgtagagatgaggtttcgccatgttacccaagctggccttgaactcttgggcttaggtgatctgcccaccatggcctcccaaagtgctgggattataggtacgagccactgtgtggaaacagggtctttagaaaggtaatggagttaaaatgatggccgggcgtggtggttcacgcctgttatcccagcactttgggaggccgaagtgggtggattacctggcgtcaggagttcaagaccagcctgaccaacatggcaaaagcctgtctctactaaaaatacaaaaattagccgggcgtggtggcaggtgcctgtaattccggctactcgggaggctgaggcaggagaatcgcttgaacccaggaggtggaggctgcagtgagtccagatcatgccattgcactccagcccggaaaagaagagcaaatctaaacaacaacaacaacaaataagttattagggcaggtccttgtcctccatgactagtgtccttataaaaagggaaaatggctaggcacagtggctcatgcctgtaatcccagcacgttgggaggccaaggtggggggcggatcacctgaggttgggagtttgagaccagcctggcctcccaacgtgctgggattgcaggcttgagccacagtgcctgactagaagtgttaattttgaggagtgagacatctaggtgggtaagacaaagctgggaggcatccaggtacctacacacgtatttaaagccatgcagctggatgacatt[142 bp omitted]tctactaaaaatacaaaaattagctgggtgtggtggcacgcgcctgtaatctcagctactctggaggctgagacaggagaattgcttgaacccgggaagtggaggttgcagtgagccaagatctcacgactgcactccagcctgggtggtagagtgagactccatctggaaaaaaaaaaaaaaaaaaagaagattaaagactgagccctggggctctctaagacagaagggtctcttaaaggaccaatctgatgagagggaaaaaatctttcgtcacaaagaaaacatccatttacaggagactagttaactaaattatgggttttgatatcgacatggaatgctccacaggcattaaaaaaaaagatgacaaaagctctgagtcaccatttggattctccagaacagatcctgagaaataatttggggtgtgagatttttattgggaa[143 bp omitted]ctactaaaaatacaaaaattagctgggtatggtggcgggtgcctgtagtcccagctactccagaggctgaggcagaaaaattgcttgaacccaggaggcgcgggttgcagtgagctgagatagcaccactgcactccagcctgggcaacagagcgagactccatcaagaagaagaaggagaagaagaaggaggaggaggaagaaagaagaagaggaagaagaggaggaggaggaggaagaggaagaagaagaagaaagaaagaaggaagaaggaagaagaagaagaaggaggaggaggaggaggagagctaggcttggtggctcatgtctgtaatcccagcgctttgagaagcagaggcaggtggatggcttgagcctagagtttgagatcagcctgggcaacatagggagcccccatctctacaaaataaaagaaagaaagagagagagagaaagaagaaaggaaaagagggagggacagaaggagggagggaaggaaggagggagggagggagagaaggaaggaaagaaggaaggaaggaaagaaggaagggaggaaagaaggaaggaaggaaggaaagaaggaaggaaggagggagggaaggaaggaaggaaggaaagaaggaaggaaggaaaggaagggagggaggaagggcagacagaactgggcaaagggagaagttaaagtggtattgagcatggacaaagccttggctaatcggcgagggactctggagccagtgagccccatcagagcatcccacatgaagtcagaatacccaggcctttattcctctgcctcacccagtcactggctgtgggctgccctgggacagatgagactctgagggaggtggctctctgcacctgaaggtgatcctaaacatggaagctggaggtttctgctcaccatacatcccttggctgggcagtaagtcccttcttaaaaggggatctgggggctgggcatggtggttggcgcctgtaatcccaatactttgggaagccgagatggaacaatcacttgaccccaggagttcaagaccagctcaggcaacatagcaagacctcgtctctaccaaaaatacaaaaagtagcccagtgcggtggtgcatgcctgtggtcccagctattctggaggctaaggcaggaggatcgcttgagtccaggagtttgaggctgcagtgagccatgactgcactaccgcactccagcctgggtgacaaagtgagaccctgccctgtgtcaaaagaaaaaggaaagaagggaagggaaggagaggggaggggagggaagggtccgggcgtggtggctcatgcctgtaatcccagcactttgggaggctgaggcaggtggatcacaaggtcaagagatcgagaccatcctggccaacatggtgaaaccccgtctcaactaaaaatataaaaaattagctggcaccaacatggcacatgtatacatatgtaacaaacctgcacgttgtgcacatgtaccctaaaacttaaagtataataataataaaattaaaaaaaattagctgggcatggtggcgcatgcctgtaatcccaggtactcgggaggctgaggcaggagaatcacttgaacctgggaggcggaggttgcagtgagccgagatcgtgccgctgcactccagcctgggtgacagagcaagactccgtctcaagaaaaaagaaagaagagaaaagaaaggaaggaaggagggagggagggagggaaggagggagggagagagggagggaggcagggagggaaggatggaaggaaggaaggaaggagaagaaaaaagaggatgtgggtgctgcagaaggaacactccatgaaagcgggggttgttctctgttttctttgcatttgtttgctttcttttataggaacaaaaacaacaggagctgtaccccaatgctgtgtacatagtaaatgctcagtaaatatcaatggaataaataaacaaatttcctggctcctcggcagccaggtgtggccatgtgagcagatctgagccaatagagaatttgtgtgtcagaatcaccctaccaactctggatgccaacctccagactgtgactgggagagaaagtcatgtctatcttgtcagtcattggtatttctctccctcacagtcatacctaactatataattaaaccagtgaaggcactcaataaatatgagttataggccgggtgtggtggctcacgcctgtaatctcagcactttgggaggctgaggcgggcggatcacgaggtcaagagatcgagaccatcctggccaacatgatgaagccccgtctctactaaaaatacaaaaaattagccgggcctggtggcgggcacctgttgtcccagctacgcaggagtctgaggcaggagaatcacttgaacctgggaggtgggggttgcagtgagccgagattgcgccattgcattccagcctgggcaaaaagagtgaaactccgtctcaaaaaataaaaataataataataataaataaataagagttacaatccataatatggatacttgataatttggcttaaaatttggccaggcgtggtggctcatgcctgtaatcccagcactttgagaggctgaggcaggaggatcgtttgagatcaggagtttgagttctgcctggacaacatagcaagacccggcccttaccaaaaaaaaaaaagaaattagccaggtgtattgtatgcacatgtggtcccagctactcaggaggctgacgcaggaagatcgcttgagcctgggaggtcaagactgcagtgagctgtgattgcgctactgcactccagcctgggtgacagagtgagatgctgtctccaaaaattaaat[144 bp omitted]tactaaacataccaaaaattagccgggcttggtggtgggcgcctgtcgtcccagctactcgggaggctgaggcaggagaatggcgtgaacctgggtggcggagcttgcagtgagccgagatcacaccactgcactccagcctgggcgacagggcaagactccatctcaaaaaaaaaaaaaaaaaattcaagccatttaagtagtcccctcttacaaggcatttatttgcaattctttgctaacgtggccatgagagactatctccagagacagccgccatcactttccatcctgttatgcccctgccactcctccgccgagtctatttcatctcctcttccccttgaatttgggttgggctatgtgacttgctctgaccaatggaatgtggcagaagagctaccatgtgacttccaagccaagcatttaagaagacaagtagcttttgctaactctctctgaagtcagttgccatatggggaataaagaccaccataccatgagggagcccaaacagccatgtggagagagagatgactcactggggctccagatatgtgagtggagaatgttccacttgtggatattccagccccagaaaatcctagctgagcccagtgcagattctcaaattatgagaaatgataagctgtggttgtttcaaactcctaagtttaggggcggtttgttacacagcactaactaactgaaacacaggtgtatgaacaactctgccataagctactttggggtcaaatcttagtgcacaggtgcacacctttgatcatttcctaaaaacaaataactggaagtgggttctgtgaatttgaaatttggtgtcaactttgttcccagagaagctgtagcaatgtccatgagccattcattggtgcatccagcatttcatccacagcctcttcagcactgagagtttccttttcttttcctaattttcaatttctatcatttcaataggcccatttgcattcattccagagaaggtaacagtgatgacagcttctctctgatcatggagtgataaccaaaaaccagtagggcaggttgatttggagccaagagccaaaatactcattcattcagaacttactgagcaaggtttggaggaatgaaaacaacacattaaatatttatggagtcctggtgtggtggctcacatctgtaatcccagcaccaagaggccgaggcaggtgtgaggatcatttgaggccatgagttcaacaccagcttggacaacataagagaaattctgtctctataaaaacagaaacaaaaattagctgggcgtggtggcttgcgcctatagtctcagctgcttggcaagctaaggtgggaggattgcttgaacccaggaggtcaaggctgcagtgagccatgttcacaccactgtactctagtctgagtgacaaggcaagactctacttcaaaaaaaaaaggagacaaactcaccttcaactctttccctctgttgacatctcagcgctttgggaggccaaggtaagagggttgcttgactccaggaatttgaaaccagcctggacagcatagtgagactctgcctctacaaaataaaaataaataaataaagttgtttttcttctatttcagatcactatccactttaagtcgtggttcttggctgggcatggtggctcacacctgtaatcccagcactttgggaggcagaggcaggtggatcacctgaggtcaggagttcaagaccagcttgaccaacatgctgaaaccccatctctactaaaaatacaaaattagcctggcgtggtggcacgtgcatgtaatcccagctacttgggaggctgaggcaggagaattgcttgaacctgcaagggagaggtggcagtgagctcagatcacaccattgcactccggcctaggcaacaagagcgaaaccccatctcataaaataaaataaatacaataaaataataaaataaaataaaataaataaaataaaataaaacagtggttctcaggccagctgtgatggctcacacctgtaatctcagcactttgggaggccgaggtgggcaaatcacctgaggtcaggagtttgagaccagcctggccaacacggtggaaccccatctctactaaaaatacaaaaattagccaggcatggtggttcatgcctgtagtcccagctactcaggagtttgaggcaggagaatcacttgaacccaggaggtggaggctgcagtgagccaagatcacaccactgcaccccagcctggacaacagagcaagagaccatctcaaaaataaaataaaataaaataaaataaataagtaaataaataaataaatagtgattctcagctgggagcgactctgccccctggaggatacttggcaatgtctgagatactttttactgttaggggggcattttttttaattgatgggggtaggggtgggggtgctcctgttatcgagtgggtggaggccagagatgctgctcagcaccctacagtggcctgggtggccttttgtactttcaaagaattctccaactcagattttcaatcgtgccaaagttgaaaaaccctactttaagtgaaatgcaatagaacaggatcaaatagaatagaaaatatcaaaggacattgctcaaataataagtttcattttataagacttttgtatttttgtgtactcagacactatgtaagat[137 bp omitted]atatcgataccttgtctctacaacaaaaactttaaaaacaggagaagtgtcactccctctccctctccctctcccccctctccctttccccacggtctccctctccctctctttccacggtctcccactgatgccgagccgaagctggactgtactgctgccatctcggctcactgcagcctccctgcctgattctcctgcctcagcctgccgagtgcctgtgattgcaggcgcgcgccaccacgcctgactggttttcgtatttttttggtggagacggggtttcgctgtgttggccgggctggtctccagctcctaagtgcgagtgatccgccagcctcggcctccagaggtgccgggattgcagacggagtctggttcactcagtgctcaatggtgcccaggctggagtgcagtggcgtgatctcggcttgctacaacctccacctcccagccgcctgccttggcctcccaaagtgccgagattgcagcctctgcccggccgccaccctgtctgggaagtgaggagcgtctctgcctggccgcccatcgtctgggacgtgaggagcccctctgcctggctacccagtctggaaagtgaggagcgtctctgcctggccaccaccccatctaggaagtgaggagcgcctcttcccggccgcgaccccatctgggaggtgaggagcgtctctgcccagccgccccgtctgagaagtgaggagaccctccgcctggcaaccgccccatatgagaagtgaggagcccctctgcccagcagccaccccgtctgggaaatgaggagcgtctctgcccgacagccaccccacccgggagggaggtgggggtcagccccgccaggccagccgccccgtccgggagggaggtggggggggtcagccccccgcccggccagccgccccgtccgggaggtgaggggcgcctctgcccggccacccctactgggaagtgaggagcccctctgcccggccagccgccccgtccaggagggaggtgggggggtcagccccccacccggccagccgccccgtccgggagggaggtggggggttcagccccccgcccggccagccgctccatccgggagggaggtgggggggtcagccccccgcccggccagccgcctcggtccgggaggtgaggggcgcctctgcccggccacccctactgggaagtgaggagcccctctgcccagccaccaccccgtctgggaggtgtacccaatagctcattgagaacgggccatgatgacaatggcggtttggtggaatagaaaggggggaaaggcggggaaaggattgagaaatcggatggttgccatgtctgtgtagaaagaggtagacacgggagacttttcattttgttctgtactaagaaaaattcttctgccttgggatcctgttgatcggtgaccttacccccaaccctgtgctctctgaaacatgtgctgtgtccactcagggttaaatggattaagggcggtgcaagatgtgctttgttaaacagatgcttgaaggcagcatgctggttaagagtcatcaccactccctaatctcaagtacccagggacacaaacactgcggaaggccgcagggtcctctgcctaggaaaaccagagacccttgttcacttgtttatctgctgaccctccctccactattgtcctatgaccctgccaaatccccctctgcgagaaacacccaagaatgatcaataaaaaaataaataaaataaataaataaataaatagactggacaccctactacccatacccagtttaagatacagattacaaccaacaccgttaaagcccttttgcatgcccttctccatcccagccccctcctaaattttgtttataatgatctcgcttttcttcataattttacctccaaaatatgcatctgtaaacaatatgctgtttttgcaagcttttgaacattatataaaataaatcatactgcatgtaaaaaaaaaaaaaaactttaaaaacattagcaggtcctgttggcgtgtgcctgtggtcccagctacttggtagactgaggttgggaggattcacctgagtccagaagtatgaggctgcagtgagctatgcaccagagccaaacaagatagcagaatgttctgcagacaatagaaaaagaaacaaatgaattaatgcaattgtttatgatgaaagtcacaccaagatgaaaattaaacaaggcaaatgttctagagtgcctgggatattagcaaaggtgttcagggaaggcttctct[132 bp omitted]tctcctgcctcagtctctcccaagtagctgggactacaggcgcaggccaccatgcctggctaatttttgtatttttagttgagacggggtttcaccacgttggtcaggctggtcttgaactcctgacctcaggtgagccgcccgcctccgcctcccaaagtactgggattacggccgtgagccactctgcctggcttgactccaagcagagtaaagcagaggctttgtggctggattgagcttgatgtgtttggggtgtgaaaagcagaccagggtagggaaggagataaggggggtcagcaggggggacggggaaccgcagttcaatttaggtttctcagccaagcgcggtggttcacacctgtaatctgaggactttgggaggctgacgcacatggatcatttgaggtcaggagttcgagaccagcctggccaacatggtgaaaccccatctctactaaaaatacaaaacttatctgggcgtgatggtgggtgccagctactcaggaggtcgaggcccgagaatcgcttgaaccggagaggcagaggcttcagtgagccgagatcgcttcactgcactccagcctggatgacagagtgagaccccgtctcaaaaaaaaaaaaaaattagcttttttggggatctcttagagtgaagaatagtgaagaagagacagtaggtcacagtgacgtgggtgatactggagcacctgttagggagctattaacaatgaagaaggtgaaaagcagttgcaatggggagaagtgaagctgattaaacaaagggagacagggaacacatctaagaggaccccgccatcccacgtcagaggcagggcaggcagggggtgcagggcagcgtccggaggagtgaaggagtggaggagtggaggagtggctgcagggatggtggcagctgttgtcctggcccttctccccagggcgggggcaggagctgcagccctggggcaaccggccgggcagggccacccacctgactcacagcagaaactgggacagcagctgccctcctacctcctcaatcccagctggaaataaaagtaagattccagacctctggccaacaccctctgagcccaaatgccggctttccaccgtgaggccctgcctgccagcgctggctgccatgtgggctttctgctttgcggacctgcaaggtattctcctaactctgtcaccttcaactccctccctctgtcttactcctgattctacaaaactgggagtgtctgtgtccccttctatctccccatcggactgcagtcccctcgaggttacagagggcacaaaattattcttatctagggtacccagcatcaagtttaagagtccagtgtcccagctacttgggaggccgaggcag[214 bp omitted]catggagaaaccccgtctctacttaaaatacaaaattagctgggcgtggtggtgggcgcctgtaatcccagctactcgggaggctaaggcagaagaattgcttgaacctgggaggcggaggttgtggtgagccgagattgtgccattgcactccagcctgggcaacaagagcaaaactctgtctcaaaaaaaaaaaaaaaaagagtccagctgggcatgatggttcatgtctcagcagtttggaaggctgaggcaggaggatcacttaagtccaggagttcaagaccagcctgggcaacatagggagaccctgtctctacaaaaaattttaaaattagccagatgtggtgacatgcacctctagtcctagctacttgggaggctgaggtgagaggatagcttgagcccagaggttcaaggctgcagtgagctctgatcacaccactgtgctccagcctgggtgacagagcgagacactgactcaaaacaaaaaaagagtctaccgcttactgcttggtaaacttcttatacatcaaaatccacttcaggagtctctctgaatctgctgtgattttttttttttttttgagatagagttttgctcttgttgcccaggctggagtacagtggtgtgatctcggctctctgcaacctctgcctcctgggttcaagtgattctcctgactcagcctcccaagtagctgggattacaggcattcaccaccatgccgagataattttgtatttttaatagagacggagtttcactgtgttggtcaggctggtctcaaacccctgtccttaggtgatccacatgtcttgggctcccaaagtgctgggattgcaggcatgagccaccacaacacctcgcctgaatctgctgtgattcgaaggactgccccgggaaaaaaaagaaaaaaacacttcaagtagactcccatgtgggaggacctgaagacttctcagacttccatggtccctgatctaacacagcaataaatcattcaaactgagcactttttacacatttttggaccctttctgaggactttctgcacaaacctaggaggtaggttatcattatccccactctgcagatgcctccaaagccctctacctacctcctttatcacctcttcatctcttggttcaatgtgtatttaatgagcacctactgtgtgtcaggcactattctagactttggggatgaagcagtgggcacctcttagatagtgacattgaactgaatgatgaaaaagaatctggcttgagaaggtgtggcaaaaaagagaagtcccaacattaccagcaatcttcctacttccaccattttgcccattctttttcctctgctggaaatgcctttccccagctaacaaactcctacttatcctgcaaagcccaattccaatacctgcttctcctaggaatgctttccggtctgatctccaggaagaatccacaacacccttctctgggctcccacaatctactccacaggtggccaaaaaatgaatgaggaggtctcagtagaagtcggccacaccaggctggaagctcttcaaggccaagacccaggctaagtcctctctgggacccctcttccaagatgagctgtgggaacactgcagcttttttttttttttttgagacggtgtctggctctgtcgcccaggctggagtgcagaggcgccatctcagctcactgcaagctccacctcccaggttcacaccattttcctgcctcagtctcctgagtagctgggactacaggtgcccgtcacctcgcccggctaattttttgtatttttagtagagacgcggtttcaccgtgttagccaggatggtttcgatctcctgacctcgtgatccgcccacctcagcctcccaaagtgctaagattacaggcgtgagccactgtgcccggccctgcagctatttttaaaataaggaataagtggggtgtggtggctcatgcctgtagtcccagcactttgggaggcaaaggtgggaggatcacttgaggccaggagtttgagaccagcctgggcgacatagtaagaccccatctctaatacatatatatatatatttgccagatgtggtagcacacaactgtagtcccagctactctggagagcaaggtgggagggagggttgcttgggcccagaaatttgaggccacattgagctaggatggcgccactgcactccagcctgggccacagagtgagattctgtctcaaaaaaataaaaataaataaagcagaaacagtagaaaacgaagacgaggccgggcgcggtggctcacgcctgtaatcccagtactttgggaggccgaggtgggaagatcacgaggtcaggagttcaagaccagcctggccaaggtgaaacccatctctactaaaaataacaaaattaaccgggtgcagtggtgtgcatctgtaatcccagctactggggcagctgagccaggagaatggcttgaacccagaaggcagaggttgcagtgacccaacatcgtgccaccgcactccagcctgggtgacagagcaagactccgtctcaaaaaaaaaaaaaaaagaagacgaattggtcggtaaggggactcgaactggagactctaaaacttctccagccctgcccactcaatttacttcattggctcctccctttcaggctccgtccctatccccgcctcacccttaatggcgcccgcccagactcctggaagtgagcggcctagcgagcgagctcccaggcgcaaagcacgccggaagctgtagttccgccatcggacggaagccgaccggggcgtgcggagggatgtggcccggaatattggtagggggggcccgggtggcgtcatgcaggtaccccgcgctggggcctcgcctcgccgctcactttccagcgcagcggccgccgcagcggacactccagaacggcctggccctgcagcggtgcctgcacgcgacggcgacccgggctctcccgctcattcccatcgtggtggagcagacggtacggcggccgggcggggacacggttcgggggctccgggctgggtggggatcggctggctgccccggcccctcacctccatctttctacccccagggtcgcggcgagcgcgcctatgacatctactcgcggctgctgcgggagcgcatcgtgtgcgtcatgggcccggtgagcgccccgcgccgggaccctccccaggactctcccaagcgcctgccgacactccctgcgcccctccttccctggccccagactttccctcaggctccgctccccttctaacccccttccctccccttctgactcccctcctggctcccggtcccccaacccgctcctcaccccttctctgctcctcggctcttaatctccgacttccttcctgacacctggcaccgctcccctcattcctacgctcaagactctccccagccattctcaccccttcctttcctgtgtccctagccccctgactccccccttcctgtgctccaaaccccctgggtcctctccactactctctccccatccccttctggggcctaaattcttccccatcccttttactttgggctctggtcccccttcctggttccctgacccatccccagcctcccttaaaactctctccccaccccgaatctggggacacccctgccctctccacctgcagatcgatgacagcgttgccagccttgttatcgcacagctcctcttcctgcaatccgagagcaacaagaagcccatccacatgtacatcaacagccctggtgagcagggtctttcctgggtgccaggggcactcgtcagggcacacgggtgactcaggggaccagaatcccgggtcagggatgttctctctctgggaaagggtgcagagcgtcagagttccagaagtggctttaaaccaccaaaaggtgcctgttgctggcttttgagcctcggttcacaagtcaggatgtggcctctttgatcctgcacatactgttctgccaacctgacccggctgacatttaaaaattggtagattttaggccgggcacagtggctcacaccggtaatcccaacactttgggaggctgaggcgggcggattgctcgagctcaggagttcaagaccagcctgggtaacgtagtgagaccccatctctacaaaaaaagtacaaagattagccgggcaatgtggcgtgtgcctgtagtcccagcaactcggaaggctgagggagaaggatcacttgagcccaggaggtcgaggctgtagtgagcccatctcaaaaataatcataattggtagattttttccccctccccaaaaaaagtagtcaattttgattgagcacttatgatggaggcatttttttttttttttattgagatggagtctcgttctgtcacccaggctggagtgcagtgttgcaatctcagctcactgcaacctctgcctccttgggttcaagcgattctccagcttcagcctctcaagtagctggggattacaggcatgtgccaccatgcctgtctaattttttgtatttcgtagagatgatgtttcaccatgttaggctggtcttgaactcctgacctcaagtgatccacccgcctcagcctcccaaagtgctgggattacaggcatgagccaccacgcctggcctgatttctagtttctcttggaaatttagtagatctgatcccatggtccactggcacatctggcaagagtcagctgactgtaaagcaagcgctctgccttttgcctgcacctgggccgtgtcacttgtttttgtcacctcccaacccctggaagcatttgtgtttgtgaaccctgctttaaagagctgcttctagaccggacgcagtggcttacgcttgtcattccagcactttgggaggctgaagtgggctgatcacttgaggtcaggagtttgagagcagcctggccaacgtggtgaaatcccatctctactaaaaatacaaaaattagccgggcatggtggtgtacttgtaatccagctactcgggaggctgaggcaggagaattgcataaacccgggaggtggaggttgcagtgagctgagatcgcgctactgcactccagcctacgtgacagtgagactcagtctcaaaaaaaaaaaaatagctgcttctggctgggcatggtggctcacacgtgtaatcccaacactttgggaggattgcttgagcccaggagttcgagatcagcctgggcaacatagtgaaagcagtgaaacccagtcttaattttttttttttttttttgagatggagtctcgttctgtcgcccaggctggagtgcggtggcgctatctcggctcactgcaacctccgcctcccgggttcacgccattctgctgcctcagcctccggaatagctgggactacaggcacccgccaccacgcccggctaattttttgtatatttagtagagacggggtttcactgtgttagccaggatggtcttgatttcctgaccttgtgatccgcctgcctcagcctcccaaagtgctgggattgcaggcatgagccacagcgcccagtcatattaatttttaaaaaaggaggggggctgcatctgttccaccctccccaggtttaggagatggaatagggaaagggtcggggggagctggtccagcccctcacttgctcccccgcccacaggtggtgtggtgaccgcgggcctggccatctacgacacgatgcagtacatcctcaacccgatctgcacctggtgcgtgggccaggccgccagcatgggctccctgcttctcgccgccggcaccccaggcatgcgccactcgctccccaactcccgtatcatgatccaccagccctcaggaggcgcccgggtgagtgccagacacgcgagctgctgttgggaatcaggacagggtctagacagaaggactgactgggcggaagtcaagcgtgggaggggatgtttttttttttttttgagatggagtctcactttgtcgcccaggctggagtgcagtggtgcgatctcggctcactgcaagctccgcctcctgggttcacgccattcttctgcctgagcctcctgagtagctgggactacaggcgcccg[138 bp omitted]ctgggccagccgggagtggatgtcttaaaatgtgcaggccaggctgggtgtggtggctcacgcctgtaatcctagcacttcgggagacagaggcgggaggatcacgtgagctcaggagttcgaggccagccaggggaacataatgagaccttgtctctattaaagaaaaaaaaaaaaaaggccaggcatggtggctcacgcctgtaaatcttgacactttgggaagctggag[131 bp omitted]tgagataggagaatcacttgaacccaggaggtggaagtgagctgagattgcgccactgcactcaagcctggatgacagagcaagactctgtctcaaaacaacaaagggaaaaaaagaaaatgcactgaggagttgtttgctgtctcttgagaattagcttcagctgggcacagtggctcacatctgtaatcccagcactttgggaggccaaggcaggaggatcacttgaggccaagagtttaagaccagcctgggcaatggtgagaccccatctctaccaaatatttaaaatgactcgggcatggttatgcttgcctctggtcccagctactcaggaggctgaggtgggaggattgcttgagcctgtgaggtgaaggctgcaatgagctgtcttgtaccactgcattccagccccagcaacagag[131 bp omitted]gcaagaccccatctctaaaaaaaaaaaacaaaaaacaaacaaaaaaaaggcttagctaatgctgagacagagagacactgttcctcccagtctgcaaggcttcagatgcagaaaataacatatacttaatccagtcagaaagccttcctggtagtggcaagactgaagcaggatatcgggggatttacacaaccccagcccaccagcctcaaaccggaagcccaaagcccagggaagctcctgagtgccacctccagcctccctgtgaggggctgacgccgataccaacctttaccccctcactcccttggacgtccctcagggccaagccacagacattgccatccaggcagaggagatcatgaagctcaagaagcagctctataacatctacgccaagcacaccaaacagagcctgcaggtgatcggtaagcaccctcctttatttcatcctggtccgtgcacagacggaccaggcgttgctctaagccagggcttctccacctggcccctgcggactttcagggctggatcgttctctgggatggggggaccatcccagaggtcagcctggccaacatggtgaaatcccatctctactaaaaatactaaaaatggtgtacttgtaatccagttactcgggaggctgaggcaggagaatctgtggaatatgagagtttgaggttacagtgagctaatttttttgtttgtttgtttttttgagacaaggtctggctctgtcgctcaggctggaatgcagtggcatgatctcggctcattgcaacctctgcctcctgggctcaagcaattctcctgcctcagcctcctcagtagctgggactacagggatgcaccaccatgcctggctaattttttgtagagacgtggtttcaccatgttgcccaggctggtctcaaactcgtgagctcaagtgatccagctgcctcagcctcccaaagttctgggattacaagtgtgagccaccacgcccagccataattttattaaaatcaaaaagtgaggccaggtgtggtggctcacacctgtaatcccagcactttgggaggctgaagtgggaggatcacttgagttcaggagttcaagaccagcctgggcaatatagtgaaaccccatttcatagaaaagaaaaaaaaattttagctgggcaccatggctcacgcctgtagtaccagcactttgggaggccgaggtgggcggatcacgaggtcaggagttcaagaccagcctgaccaacatggtgaaaccccgtctctaccaaaaatacaaaaactagccaggtgtgttggcacacgcctgtaatcccagctactgaggaggctgaggcatgagaatcgcttgaacctgagaggcggaggttgtagtgagtcgagattgcaccactgcactccagcctgggtgacaaagtgagaccctgtctcaaaaaaaaaaaaaaaaaaaaagtgaatgttccacagcatcacagatgaattttgcaaatatgttgcatgaaagaagaataaacactctgtgattccatttatttaaactataaaaacaaggagagctaatttatgctgttagaggagtggttgctttggggtatggggagggggtggcaaggattagtgactgtcgtgggcccaagtggggtttcaggggtgctggcattattccatctcttggtctgggtgctggtcctgtagggtatgttcagtctgaaaatccatcccaccagacatttacgaatcatgccctttcctgggtgtatattatacatcaataacaatttttttttttttttgagatggagtcttgctttgttgcccaggctggagtgcagtggtgcagtctccacctcccagatttaagtgattctcatacctcagcctccctagtagctgggattacaggcgtgtgccaccacacctggctcatttttgtatttttagtagagacagggtttcaccatgttggccatggtgaaactttgaaggccaatggtgaaacatgaggccaaactcctggcctcaagtggtccacccacctctgcctcccaaagtgctgggattacaagtgtgagccaccgtgcctggcccaataacaattttttaaaaaacaaaattgaaattggtattttactgatacctaggggaaactgaggcactgcagaatgaggacatgtctcagtcagcttgagctgcttaacaaaacaccacagacctcaacagagatttatgtctcacagttctgggggctgggaagtccaaggtcagggtgccagctgattcggttcttggtgagtgctctcttcctggcttgcagacggccgccttctcgctgtgtcttcacatggtggagagagagcaagtgcactggtgtctcctcttataaggccactaatcccatcaaggggcccctgaccccatctctcctaatgacttcccaaggaccccatctccaaatcccatcccactaggggatggggcttcaacatatgaacttggggtggtgggcacaaacattcaggccaaaacaggacccagacctggccctgggtctctgctcttaccctaatgtgtctcacctcctgcttccccaccagagtccgccatggagagggaccgctacatgagccccatggaggcccaggagtttggcatcttagacaaggttctggtccaccctccccaggacggtgaggatgagcccacgctggtgcagaaggagcctgtagaagcagcgccggcagcagaacctgtcccagctagcacctgagagctgggcctcctctccagaatcatgtggaggggccagaggcctgccagacccccagctgggccctgctcaccccttgttgctgggcttggaggggcctcttgaggaacttttaatttgcaggggtgcccgctatggacggggcattccagctgagacactgtgattttaaattaaatctttgtggtctttgctctgcgtctgggacaccctcccttctgcaccatgacagcgtgtacacatctgtgtttcacaggccccttctgcttttgtcctgaccccaagaggcaagccatgtcttccttcaacagattctcctgatcatatcctatattccaggcagtgttcttttgtgaagaagacacaagaaaccctcctcaaaagagctccat[133 bp omitted]catggtgaaaccccatttctactaaaaatacaaaaattagccgagcgtggtgcacctgtaatcccagctactccggaggctgaggcagaagaattgcttgaacttaggaggtggaggttgcagtgagcaggatcacgccactgccctttagcctgggcaacagagcaaggctctgtctcaaaaaaaaaaaaaaacaaaaacaggaaaggtggcatgcaagtgtgagggtaagcgtgttacagttttttatggggtaatcagggaagccctcactgagaaggtggtggttgagcaaagcctcaaaggaggtgaggggtggagcctgtgtccaggcagagggcacagccagtgcaaaggccctgtgacaggactgtacctggcatgtgaggacctatgaggaggcccgtggctgagggaaggtggaagagaggagatcaaaaagtagaggtgaaaattagccaggcgtgatggtgcacttgaacccgggaggcagaggttgcagtgagccaagatcacgccactgcactccagcctgggcaacaaagcgagattctgtctccaaaaaaaaaaaagtggaggtgattgagaatagatcataaaaggcctgacatctaaaaggagggatgtgaaccatggagggttttgagaagaggaaggaaaataaggatgactatgactcctgaggagtgcaccatgagcagaaactggagagcagttaggatagttggagtaatctagacgaaagctgatggcagccctggccgagtgatgagaaaaagtcagattctagctaggtgggatgtgacagagagcagtttccagaaactccgagctgatggcccaaagcaggaagatggagacctgtcgcctgagatgggaagtgtaggcaaaggaacaggcttggggagggatcaggagttgattttggatatattatacctgatgttttgatatgtccctcgacatcagggtcaagaggttgaaataaaaacgtaggtgtcatcggccgggcgcggtggctcacgcctgtaatcccagcactctgggagaccgaggcgggcggatcacgaggtcaggagatcaagaccatcctggctaacagtgaaaccccgtgtctactaaaaatacaaaaaattagctgggcgtggtggcaggcgcctgtagtcccagctactcgggaggctgaggcggcagaatgg[133 bp omitted]aggctcattaacagtcagactgagacctggctattggattcggcattgtggatgtcactggtggccttaaatcaggccttttctggtgctgtgggagccaaaagccaggctggagtggatccagaaaggataggaggaaacatatcagacatagacaagtctttcgaggaattacactatcaaggggagcagagggtgggggggcagatgtagctggagggagaaatggggtcaatatttttcaaaatgcaagcattcgggccggggtcgggggggcgctacgctcagcagttacagtgttgcagtttgcattatgcacatttaaaatacatacaaaagtacccagagctttgagaggctgaggggagaggatcacctgagcccaagagttccaggctgcagtgagctatgatcgtgcccttgcactccagcctgggcaatagagggagaaaataataaaataaaggccgggcatggtggctcaggcctataatcccagcactttgggaggccgaggcagacgggtcacctgagatcaggagtttgagatcagcctggccaatgtggtgaaaccctgtctctactaaaaatacaaaaaattagccgggcgtggtg[132 bp omitted]caaaaaaaaaaaaacccaaaaaccaaaaaaataaaaaacaaaaattagttgggcgtggtggcagcttcccgtaatcccagctactcgggaggctgaggcaggagaatcgcttgaacccggaaggcagaggttgcagtgagccaagaccgcaccattgcactccagcctgagtgacaagagcgaaattcggtctcaaaaacaaacaaaacaaaaaagctgggcatgatggttcgttgcctgtaatcccagctactcgggaggctgaggcatgagaatcacttaaaccccagaggcagcggttgcaaatcttcagggcctgagatcgtgccactgcgctccaggttgggcgacagagtgagactctgtctcaaaaataaacaaataaaaataaatataaacaaaagtagagaaaacagggtaatgagaccccacgtacttatcacaccaattcaacaattaattcacggtcaaagatgattcttccctacccgccccctccctgcccccacagcctggatttatgtggaagcaaatcccagagatcttttttctgtaaatatttttttttcagtttgcgtttgtaaaaaacgatgactcttttttttttttttgagacaatgttttgctgtgtcgcccaggctggagtgcagtggcgggatctctgttcactgcaacctccgcctcctgggttcaagcaattctcctgcctcagcctcctgagtcgctgggattacaggcacgcgcgccaccaagctcggctcattttttgtattttcagtagagacgggttttcaccatgctggccaggctggtctcgaactcctgacctcaggtgatccacccgcctcggcctcccgaagtgctgggattacaggcgtgagccaccacgcccggccgaggaatcaaaaagacaaccataatgccattttcaaacctaaagtaatagtgatacggagacggggaaatgaatgatacctcgctctgacctttgaccataagccctaactctggatagctggccccaccacacacataatcgtggccttgacgtcagtcccctgaccccggacccttatctcggcctgactgtactctgcccttaacctctagccctagtcgactccataaccgtggccttggccccagtccccctgacttccggacttcagaccagatactgcccatatccccttatgaagtcttggccaggcaacccctagggtgtacgttttctaatgattaaagaggcggtgctaagctgcagacggacttgcgactcagccactggtgtaagtcaggcgggaggtggcgcccaataagctcaagagaggaggcgggttctggaaaaaggccaatagcctgtgaaggcgagtctagcagcaaccaatagctatgagcgagaggcgggactctgagggaagtcaatcgctgccgcaggtaccgccaatggcttttggcgggggcgttccccaaccctgccctctctcatgaccccgctccgggattatggccgggactgggctgctggcgctgcggacgctgccagggcccagctgggtgcgaggctcgggcccttccgtgctgagccgcctgcaggacgcggccgtggtgcggcctggcttcctgagcacggcagaggaggagacgctgagccgagaactggagcccgagctgcgccgccgccgctacgaatacgatcactgggacgcggtgagaccggcagcgccgggggcgagggacgggggctcgtcgggggcgcggcctggggacgtggagcatcagatggggcggggacacgctgggggcggtacctagagcggggatttggagcggggacagaggagacgagcgccgggaccgggcagggccacactgggggcggttacagtaccgtttagcgtgggggcggggctacggtgctggggttgtggggccaggggggtcgggcgcagggatggggcggggccacgctggggcggggacaaaggagacagcgcagggatggggcgggggcactctgggggcgggacaggaggcgagcgtagggacggggcgtggccacgctgggggcggggacagtggggaccagtgctgggatggggcgtggccacgcttgggggcggttacagcgcagtcgagcgtgggggtggggccagggagtcgggtgtagggttggggtgcgattacgctgctagcagttacagtgcagaagaacgtggcggctgggattggggcgtggtcaggtcgtcgagcgcatggatggggcggggccaagcttggggcggggtccgtggagtcaagcgccgggatgggttggggccatgctgtgggggggacggggaagtcgaggtttagagagggcagaaccacgctgggggcggagataggggagacacatgctgggatggggcagggcctttttggggtcggtagctattgcagggatttgggagctgggctatggtgggggctgggctgaaactctggctgtgggaggggcgggacctgggggatgaggaccttggggtcagggagagcacttttgcgacctgggaccaaggttaggggcggaaacggatgtggagccagatgatgttgagagacagagacaggacacttgggtggggtcaagttgtagggagattcagccaattgaatgctggggccgggccagcattggggacctggaattgtagcctcagggtgagtactaaggactgaggtcacacctaggtagggccatagttgaggggctaggggagtttgagttgagggcagggtcaagagtcacatagggaaaccagccccttgccgttttctgcccctccttgcctcagtttccttgttccctctgggagctcccaggcttaaccgagctctctgtgcaggccatccacggcttccgagagacagagaagtcgcgctggtcagaagccagccgggccatcctgcagcgcgtgcaggcggccgcctttggccccggccagaccctgctctcctccgtgcacgtgctggacctggaagcccgcggctacatcaagccccacgtggacagcatcaaggtgggcagaggacggtgccttggcactcccagccagggggtaggcaggcccggttagatcctgacccatccccacgcctcttttgcagttctgcggggccaccatcgccggcctgtctctcctgtctcccagcgttatgcggctggtgcacacccaggagccgggggagtggctggaactcttgctggagccgggctccctctacatccttaggtacctccatccaggcagcacccacccctccaagaatgtgccatccgcccaccctgtgccctgggtactttccctcaatccagccctccccgaagacgcctttaccccagggtctgtgtgggaggcagcagggggctggaatccaggaggctggaatccaggtctgcctggagcaggggctgccctccttgcacccagtcacagcctgtttcttcctgcaggggctcagcccgttatgacttctcccatgagatccttcgggatgaagagtccttctttggggaacgccggattccccggggccggcgcatctccgtgatctgccgctccctccctgagggcatggggccaggggagtctggacagccgcccccagcctgctgacccccagctttctacagacaccagatttgtgaataaagttggggaatggacagcctaactgggacattgcagtggctgcttgctggggccgggatttgcaggggaacccaggatggcactggcccatagggagctccaggtgtggctggctggacacatggtcaaagtcacaaggccgggagagtggtgtcctttattgcactcactgctggtcgccccagcccactcccctcctcgttgtctctgcatccaggtctccaataaataagtcagccgagctcccccagcactgcagcttctgggtgccaggccgggcaccctcagccaccacagccgcaggcagccgccgagagctggggcagccgctgccagcggtggcggtcatcgaggaaggccacgtcggtgtagcgagtgggccggcagcagggcccgccgtgggctcggccctggccctgcagccgggccagcgccaggccatgctgggtgcgggcaccacgggggcagctgccggcgcagtagcggaagatgaccttctcctctgaggcgtagcccaggcctagctctgccacggacagggtcaggctccacagctggcatggaccagacagggctcggcgcaggcgggcaagggggcggtgggtgcctgtgggagggaagggcgctgacagtgagcagggtcagggctggggaaagttgggaagtcacagagggtccctggaagtccttacccagccaggtccctccagcctttgccacctgttcagacgagaactctccatcggccacgggaaccccacgggcatcggggccccagccctgtcccagctgcagggacaggagcagcagggagcccagcaggaacttccctacggccattgtgacgggcaggtcctgagagtgggagctgtgccccaaatttatgccctgcctgggctgggagctaacctcttcactgccggcccctgcagccaggaggccccacgtctgcaccagcccatctcctgcaccctcgaatccaggcatctgctccttctgccccacaccccacccttctaagagttaagggctcacccccagcctaccccaccccgacattccacacagccatttccgacgccccagacaccccctgatttacgagtgctgtgctggcggccagggcaggcaactggtgttcccccgacctgctgcctggagtggaagtcagggggcttcatgggaccccggtggggtccctccccactaagtcagggtgctggggctcaggagcccccacgtgtatcatgtgccaggtggagcatatgtgagtgctgggaaaggtggcttggcaggggactgagtccacgggaaccctccatggtggctcccgcctggaggattaggacatcatgcccctgtctccgggcctggctgagccagcatcaaaacaggaaaagggagaggcctggggacagccaagggtggggacacaaggggacagggacgcctgtctcgggaaggccaacctgagacccctataactgcagccccatcctgggatctgagcatgtcagagcccccggggcgatggaggctgtccaggtcatggtaacgtctagcacgatgcagacagataagggctctcgaggcttccatacccagccccgtgtgagcccagtcccctcaccggtacaggggagctcctcagaacccctcctactcggcttggtgaggaaagagatgggcacttagagtgtaaggcagtgcccgtagcttcgaatgcaaaaacaagcaaacagcttgtgattgtccgaaggggtgcttgactctaagcacccacaagattggggaaaatcagaaaaccctcacacacaacccgtgtgacccaggtgcaccctgtgctgttggtgggggtgtaaattgctagcagctctttggatgagcagctgctactggggaattgtaaattacaccctctgccccaggagccctgtttgcggggttcctcccacacaggcaagtgaaacagccagcacagggacatctgatgccttcttcatattaggaaagtctggaagtggcctcaactccatccgtgagggattgcttcgatgattatgttgtggtttttcttactgaagtgcttattgagatgataattttccgatggaaagaaaagcctgggcttggcgtggtggctcatgcctcgggaggctgaggcgggtggattacctgaggtcaggagtttgagaccagcttgaccaacatggtgaaatccatctctattaaaaatacaaaaattagctgggcatggtggtgggcgcctgtaatcccagctactcgggaggctgaggcaggagaattgcttgaacctgagaggtggaggttgcagtgagctgagattgtgccattgcactcaaacctgggcgacagagcgatactgtctcaaaaaagcctggcggggcccagtggctcatgcctataatcccagcactttgggagggtgaggtgggaggatcacttgaggtcgggagtttgagaccagccaggccaa[141 bp omitted]aactccgtctctattaaaaaattagctgggtgtagtcccagctactcgggaggctgaggcaggagaatcgcttggaacccaggaggcagaggctgcagtgagccaagattgcaccactgcactccagcctgggcagcagcatgaaactccgtctcagaaacccaaaaaacaaattagctggaccgtggtggggcgtgcctgtcatcccagctactcaggagactgaggt[133 bp omitted]aacggtcctggtatttgaacccaggtcctccgtgaatgcaaaacccctgctcctcaccacagggcctcaccacccagcctccttacatgaaggcccaggcagtgggggtggctggggcgaaactgctgaggcagcggctccctccagagctgcctccctgctgcccaagaaggcctggtgggagaagggggagggaggttggcctgaactgggacattccgaggaattagccagacatctcaggcattcctgctcggcagccaagggctgcagaactgggtggggaagacttccacctgcaagtttccaaccaccggcaagacagaagggattgcccggaagatgggttcaaaagtagtggctgcaggcaaattccatttccagccatattaatgtttccagccacattttccagttccatttccaggaactggaaaagccctcccttacagaatgcctggcaacgccagatcaaatatatgcatgaccgagcttgtaagaagggagaagccccccgaaacatcaccgggaacctcaaacatagggacccacaatcggggcagtggggggggttggctttggtggccacctgcaagctgagaaccacacacaaaatgggctggggctggcgctcctgggtagctagcgaaagccaaggctgaaccatctggaaggactgcctgcaaagtaggccaccccggattcccacagagcccccagctggccatgagcatccaatcccaaatcacaagaaaatctatcactaaggggagtcagaagaaacaaaaggatgcccgggaacttcagcttctaggattgtcagacctcagtcaggatgagtaaaataaaaacatcagccaggcgtgggtgggtgcagtggctcacgcctgtaatcccagtactttgggaggacgaggcaggcagatcacctatggccaggagttcgagaccagcctggccaacatgctgaaacaccgtctctactaaaaatacaaaaattagccaggcgcggtggcgggcgcccgtaatcccagctactcgggaggctgaggcaggagaactgcttgagcccaggaaccagaggtcgcagtaagccgagattgtaccactgcactctagcctgggcaacaagagtgaaactctgtctcaaacaaaaacaaaaacaaaacacattagccaggcatttaatggtacacgcctgtggtcccagctactcaggaggctgaggtgggaggattgcttgagcccatgagttcaagactgacctgggcaatacagtgagacctcacctctacaaaaaattaaaaaattagctgggcgtggtggtgtgcactacttgaaaggttaaggtgggaggatcgcttcagcccaagaggtggaggttgcagggagccaagacggtggacactgcaatccagcctggtgaacagagcaagaccctgtctcaaaacctaaaatataaataaaaataaaaccatgaaagatgggaccaaaacataaggaataagacattatccaaacagagtagcagatctaaaaaggaaacaaagaaatctgagcaatttattattattttttatttattgagacagagtctcactgtcacccaggctggagtgcagtggcgtggtgtcagctcacagcaacctccacctcccaggttcaagtgaatctcgtgcctcagcctacggaacagctgggacaacaggctcccgccaccatgcctggctactttttttttttttttgtgccaggatttcattctgtcacccaggctggaatgcagtggcaccatcatagttcactgcagccttgaactgggcttagcctcccaagtagctgggactgcaggcgctcaccatcatgcccagccaaaactgaagacttactgggctatgtggtggataagtcacagctgaagagagacttagggaagtggaagggagaactgtagaagttacccagtgggcagcacaggcccttggtcagtgtgagggaggccgagccaggaggaggaggacaataagaaggcctaacaggcatctgaagattccagaaggaagggccagaggaggagatggcttaacttttccagaattgctaactacggggccctgggagtcagggagcaagcaggatgtcgaagggtcactgagagcctgaagttctggagggcagagccatgtattggacagagcctcactctaggatggcgaaggggcagtgagagccttaagttctggggggcagagccatgtattggaccaagcctcactccttgagggagaagtgcattttgtcgttgatcatcttgcgctcggggttgagtcgcttgaggatctgggccaacacgttcactgtctgctcgctgctcagccctgtcttcttggtctggaactttttcagcaggtccttagtggtcatgggcttccgtgtcaggtagcggcgcacggcatcctcagtcacctgcacgtcgctgaggatgggaggacggggaaggtggcatcagtgagattgtccccagtagcccttgccctgccccctgctgtcctcgtcaacttacccgctgttgggtgttgtcttgcctgatggtggctggggtgtcgacttcccagacaggctctggggtcccgtgtccagccgcaaccgcttggctgcaggcatctcgctcacccgcttccctgtgggagtggggtcagggctgagtcttgcaggcaggaggcagaacccctgggcaggaccccaggctgggcagtgccaggattagggttcaaggggatcagggagagacaggcctccacccgcatctccatcccctctctgtcctgagccccaacagaggtcaggaggctgtggctgtggctgtggggagcggggaggccacgggcactcaccttgctcgagtttgctggcagccgcccgcagggtggaggaggtgctgccaccctctgcgctgggcgtgcctgggcggctgttgccccttgagctccctcccgacggcttccgctctctcttgggtggcgtcttcttcttctgcagaggtcagggttgggaggtgggtgagtctgcaaacagacgcccaggcctcccccgccaccgggctgggccttaccgccatgaagagggctgaggaggcctcgctgtcaatgtcgctctcctctgagctgtccgactcctcgctgctgtctgcggggcacaggaaaggggtcagggccagagcaaccccgggacccggtgcccactggtgcctccactgcagatgagggaggcctgcaggggagaggggaggaggtggcagggcgccagggcccgacccaagcctccaatatgggggccacatgcgccgcacctttcctgcgcttcttctcctgcggggtgggtgccttcttctcctcctcctcctccttgtcctcctcaggcggcttctcctcctcactctcctcactactgtcgctctgctcatcgacacctgggaggggcagggtatgagcaagagcagggaagcaccgcccccatctccccggcccgcccagccatcgcctacccttgggcccctcctcctgctgcggcgccttggccttgctctcaggctcttcttgggagctactgtaagacggggatggcaaaggatgagcgcgcgctcgcgaggctgcatggggtctcgcaggcgcctcccgtcggcctcacctggagccgtctgacatgtagtccacctcttggccctcgaagtccccatcatcgctgtcctcgaaggcctcgtcgtctgaacccttcttcttcttctttttcctgccgcccttggccagcggcgccttcttcttggccttggggactctgccccctgggaagggaggaaaggaaggaaaggagggaaagtgaggaggaaggcagtgggtatttattgtgtttttcacattttgtgcagttttgacatcctggggggcctcactgactggggagactacacctccagggccagcccaggagctcagctctcctaaacaaactcccggcagaccccacacccccacccaccttctctagcgctcacagaccactccccctctcccagaccacccgggcgaggcacctgataaccagggacacagcccctacagcccggagcgcacaggagttattgaaactggtcaacctagagttgcagtttctcataggaacccccgtaaaggccacagccaggccaggtgcagtggctcatgcctgtcatcccagcactttggcaggctgaggcgggaggatggcttgagcccaggagtttcagaccatcctgggcaacacagtgagtgagaccccagtctctacaaaaaacacaaaaattaggccgggcgtggtggctcacgcctgtaatcccagcactttaggaggccgagacaggcagattacctgaggtcgggagtttgagaccagtctggccaacatggtgaaaccccatctctactaaaaatacaaaaattagccagcatggtggtgcatgcctgtagtcccagctacttgggaggctgaggcaggagaatcacttgaacctgggaggcagaggttgcagtgagccgagattgcgccattgcactccagcctgggcaacagagcaagactctgtctccaaaaaaaaaaaaaaaaattagccgggtgtggtggtgcacgcctgtagtcccagctactcaggaggctgaggtgggaggatcgtttgaccctcggaggtcaaggctgcagtaagctgtgattgtaccactacactccagcccatgtgagagagagagagatcctgtctcaaaaaaaaaaaaaaaaaaaagaagggccatggctcagctctcccgggctctggccttgcctcctgactgacatcactgctcctccaggcggcctcgcctgactctcattcttttttctctgagacggagtctctctctgttgcccaggctggagtccagtggcgtgatctcggctcaacacaacctctatctcacgggttcaagcaattctcctgcctcagtctcccgagtagctggcactagaggcatgcaccaccatgcccagctaatttttgtgttttcagtagagacacggtctcactgtgttggccaggctggtctcaaactcctgatctcaggtgatctgcctgcctcagcctctcaaagtgctgggatgacaggcgtgagccactgtgcccggccccacttgcctctcattctagggccactgtgagcgatggtagactttgccttcactggcactgcctgagcaggcacctctgtgacctaatgcccaggcgcccgtactcaccctcctcaccactggcatcactggcatcggacgacatctccaggtcgtcctccaggtcgtggatgcgcagctcgctcgccttcctgcggccacgtttctccttctcctcctcatcctcgtcctggtcctgatccttgagccgccgctgctgcatgatgctgaagtggttcagcaccttgttcctcctgcgggccaggcacaggggggctcatgccgggcctggcaccaccctgcatctgtgcttgcagggggcgagccccagggcaccacccacatagccttcaaggtgatgtggcccccggggacttgggctgtggcacaggactccctgaaaccacacggatagagccagcccttcctgccttcccgttctgccccgagtccctcaaagagcaggtccccatgtgctgctggagtctcagcacctccctcggactcagagtctggccccaatccagtcacactggtttcttgctattttttattattatttttttattttctgagacagagtatcgctctgtcgcccagactggagtgcagtgatgtgatctcggctcactgcaacctccgcctcctggcttcaagcaattctcctgactcagcctcccagatagccggggttccaggcgcctgccaccacgcccagctaatttttttttttttttgtatttttagtagagacagggtttcaccatgttggacaggctggtctcgaactcctgacctcatgatccaccttggcctcccaaagtgctgggattacaggtgtgagccaccgtgcccagccagatcttttgttatcttaatttatagatgtatttttctttaatgacaaaacatactgtttccattggaacaatgtaacgttgt[145 bp omitted]gaaacctcatccctacaaaaaattaaaaaattagccgggcgtggtggcatgtgcctgtagtcctgactactcaggaggctgagggaggagaatcaattgaacccaggaggcagaggttgcagtaagctaagattgccccacagcactccagcctcggtgacagagtaagaatctgtctccaaaaaaaaaaaaaggactgcatttaataggaatgcatctaacatgggcaaggcccaggctggtgtgaaagataatgaaactgctgcttaacactgtgagtggctttaccacactgagccatgcaccaaaaaacagtgacagtttggtgcagtggctcaagcctgtcatcccagcactttgggaggggaggccgaggctggaggctcgcttgaacccaggagtttgagaccagcctgagcaacatggcgagacaccatcaccatttgttcttttcttttcttttcttttcttttgagttggagtcttgatctgtcaccgagactggagtgcaatggtgtgatctcggctcaccacaacctccacctcccgggttcaagcaattctcctgcctcagcctcccgagtagctgggattacaggtgcccgccaccatgcctggctaatttctgtatttttagtagagatggcatttcaccaaattggccaggctggtctcttggccaggctggtctcgaactcttgaccttgcgatccgctctccacgtgcccagcctgaacagttcttagctaagtagatttaacatctgatcaagagatggcattctggccgggcaccatggctcacacctgtaatcccagcatattgggatgccaaagcgggcagatcacttgaggccaggagttggagaccagcctgggcaatatgctgaaaccccttctctactaaaagtacaaaaattagccaggtggggaggtgcacgtgtgtagtcccagctactcgcaaggctgaggcagaatcgcttaaacccaggaggtcgaggttgcaatgag[132 bp omitted]taaaatgccaaattcttctccctaaaacttacaaagcagattctaaggaaaatacagcaaaagcgaacctgcccccccagcaatgattgatcgactgattttacagtggagccccaggaactcaaccaaagtggagcaggcaggcagacctgggggctgttgttccaggggagcaggggtacagaaactgccccacaggctcggaggctcatgacctggtggggaggacgctctgacttcgtgccatttaccggggttgcttttggagctgagccaacctatgactcttcaga[143 bp omitted]accaaaaaaatagaaaaaaattagccgggcatggtggcaggcgcctgtagtcccagctacccaggaggctgaggccagagaatggcatgaacccgggaggcggagcttgcagtgagctgagatcgcgccactgcactccagcctgggtgacagagcgagattcggtctcaaaaaaacaaaacaacaaaactaaaacaggccgggcgtggtggctcacggatgtaatccccacacttagggaggctgaggggggcagatcacctgaggttaggagtttgagaccacctggccaacatggtgaaaccctgtctctacaaaaaatacaaagttagccaggcgtggtggtgcatgcctgtaatcccatttctctacttgggaggctgaggcaggagaattgcttgaacctaggagtcggaggttgcagtgagctgagattgcgccactgcagtccagcctgggcaacaagagcgaaactcagttcaaaaaaaaacacacaaacaaacaaacaaacaa[132 bp omitted]ctcctgcct[175 bp omitted]cccagccgaaaaaggtgtttttttaacctttgggagccatcgactctttgagcatctgctcatctgtgacctgtgcaaatgccatttgtagatgcgtccagagtgccctccccaccatctgcaagcaccctagggtggtggtggccctacggtctcatccaaagccatacatccaagaccaagtgctctgggcccccagcctcgtccccctgcccacagtcactctgcactggcctcatgcactgtgtccctccacagcccttaactgcacccgccccacctctgaggccgatgtcactgctagagaaaccctcctcgggtgccctgcctggagctgctgccctgcagtggatcaggctgtgtgacctgcagcctgcggaaagccaagggggcagttagaccccaccctgctctgccaatttgagctccgggtcacagactctggctctggcagcaccctctggggtgccccattgtggccctaaggcctcctatctgtttcctcctgaactgacagctctgagacggccgagtggggtctgccctggttacccctgagtccccagctcccagcacagggcctggtgatatatccatggcaaggcaccccatttccctcacttctgtccccagccaccacccagcccactcacctctcccactcctcctcggcctcctcggcagtgagcgtgcgatgccgggccagcggtgtgaaattgtaccagttgtgcacggggaaggcctcgaaggccccgtcggggcactgggtgaagatgtagtaggacgtgttctctgttacgcctcccttcttgatgcccttgaacctgcagggagccacggtcatggcctggcccatagggaccagccccagcccccccgtgtccccccggggcctgcctcctttatggcacttgccataggaggaagaccaagaaatgcccatgaggcctgggcaggcccttcaaccacctgggcctcgtcaatttccacatctggggaacagggccggcgcacctaccctgcaaagtgctgggcgtgtgcacatcgggatcatttctggaaagactgtgtgagattatctcaggagagcccaaccctgcagtcaaactgtctacatttgcctccagctctgctatctgtgggccacacccgggaaactgaggagccaagtgagaagatggggcgggaaggcatggccaaatttttttttttgagatggagtctcgctctggcacccaggctggagtgcagtggcaccatctcagctcactgcaacctccacctcccgggttcaagcaattctcatgcctcagcctcccgagtagctgggattacaggtgtctgccaccacacccagctaatttttgtagttttagtagagacagggtttcaccatgttggccaggctagtttcgaacccctgaccccacgtaatccgcccgcctctgcctcccaaagggctaggattacaggcgtgagccaccgcgcccagccatggcatggccaaatctgaagtggacacctggcccgggccaccatttcctcaagcctaaacaactgcccagcctccttgaggcctctacctcattcttttctaccccaaagttccggacagtctgggtgagtgcctcttccctgcctacagctttccaaggctccgctggacccagcacatcctggcacccactgccctgtgtgagctgcctgtgtctgtcactatcacccaactgctgtgcctggagcacccttcatcaacctaacctggacccctcctgttctgccctcagtctgccccctctgagaggtcatctcaagtgtcatgagctcccagggctggccacctaagcttcctgcattgtggcactcagagctgcctcagagccaggcacaagcaccaactcagtgaactgtcttcaaaaacacaaccccagggcctgggcagtggctcatacctataatcccagcactttgggagaccaaggtaggaggatcacttgaccccaggagttcaagaccagcttgagcaacgcagcaagaccccatctctaccaaaaatacaaaaattagccaggcatggtggggcgtgcctatagtcccagctactcaggatgctgaggtgggaagatctcgagcccaggagttggagcctgcagtgagctacgatcgcaccactgcactccagcctgggcaacggagtgagaccctgtctcaaaataaataagtaggctgggcacggtggctcacgcctgtaatcccagcactacgggaggccgaggcgggaggatcgccaagttcgagaccagcctgaccaatatggtgaaaccctgtctctactaaaaatacaaaaattagctgggcgtggtggtggcaggcacctgtaatcccagctactcaggaggctcaggcaggagaataacttgaacctgggaggtgtgggttgcagtgagccaagatcgtgctactgcactccagcctgggcgacagagcaagactctgtctcaaaaaaatacaagtaagtaaaataagataacataaataaataaataaataaataaataataaaatcctacagggatggaagtgccagcacttccactgcagcagtgggaatctgaggttcagagagggtaccccacaaagtatgtaagttgaggcctggggatgtggactggtcactaagccggcaccgccaccgccccaccacttacttcctgcctgatttgccgttgacccggagcagccagggctggtcctcgggccggaactccttgaggacgatgccgtacttcttcctccgagcctcctcccgaagcttgcggttgaactcactgcccgcgcccgattcgggcatctcctcctcttggtagattttcttgttgctcaagtcccgctccagccgagcctaggggagcaggaagcaaagcctctcagggtccctggctttgcttgcgcagtgcccccctccaggaacgcccttccttgccctaggccaagctctagattctcaaaaccaacttaccacttggcaacaagggaggagaacggtagcctttgacaaatctgggtaaagggaatttgggcgagccttgcgctctatttttgcaacttaaaagcttgaaattatttccaaattaaaattaaagagaaaaagaccacctggtgaccatcaagcaggccatcggaggcaaaattccttatctgaggaatgtagaagtaattaattagacttccctattatctacagcaggcatctggttccaggattcttttcaaaaaatgtctaagtacctagaatttccacacatctctccagaatgcatgcatatcgaaactcattgtgctgtggctcacacctgtaatcccagaactttgggaggccaaggcagaaggatcacttgagctcaggagtttaagaccagcctggcatcagaatggcttgaacctgggaggcggaggttgcagtgagccgagatcatgccactgcactc[224 bp omitted]gaggcaggagaatggcgtgaacccgggaggcggagcttgcagtgagccgagatcctggcgctgcactccagtctgggcgacaaagcaagactcagtccccaaaaaaaaaaaaaaaaaaaaaaaagaccagcctgggcaacatagtgagatcctatatctatttcctaaaaataaaaaggctgggcatggtggaaggctgaggcgggtggatcacttgaggtcaggagttcaagaccagcctgaccaacatggcgaaacttcgtctctactaaaaatacaaaaattagctaggcgtggtggtgggcgcctgtaatcccagctacttgggaggctgaggcaggagaatggcttgaacctgggaggtggaggttgcagtgagcccaggtcgcgccactgcactccagcctggatgacaagagactccatcacaaaaaaataaaataaaataaataaaaagaaactcattgtgcaacacttgctgacattaaggcaccaaaatctctacaaattaacaatttatcgtgacctacatggctaatgtgatccgaattacccttaagctcttgatttaaggtccatatataccatttccaaaacactctagaatcagccacatctcataacctccactgcctccagtgccctgccaggactcacctagaccagtccagttgcttctaccttggtctccgtttatttgccctcaaacccacagtttgtctccccatagcagccagatcacacacactacaacttcccaattgaagatgctttaatggctcccaaagtcctttctagagcctctgatggcaggggctctgggaaagcccccagcccagtcccctcccttgcccagataaaccatggccaaaaatgtccaacagtgggcacagcttctaaatgttctcctttaaggagaggcctctggtgggcctaccaaacctaacttacagggacacccaggagctaggcctgggcctttgccatttccgtttttttttttttttttttttttttttttttgaggcagggtcttgctctgttatccaggctggagtgcagtcgtacaatcatagctcactgcagccttgaacccctgggctcaagcgatcctcctacctcagcctcctatgtaggactacagacccacgctatcagccccaactaactttttaatttttttgtagagttggggtcttgctattgtattgcccaggctggtctcaaactcctggccttaagcaagcttcctgcctcagcctcccaaagtgctgggattacaggtgtgaactactgcacccaaccctttgtcatctatcttttcttcacttggagaaaagtgagaaaattaagacttagtgactatgacagttaagcaactatcacaaccaccaaggtcagggtcaagttctctcaccaccccagcccctgacccccaggactcagagacttacctgattccacgtagcaaagttgactttgtcggctgcattaaaagccatgatgttatattttttggttgtattcctggagtggatgagaagaggtagtgtcaatccaatacagcaattcaatcattaatttaatcagtcaatgctattgaaccattaattcaatcaaccacccaactggatcgttaattcaatcaaatcattactttaattcaatcactcaattcaattgaaccattaattcaattcaatcattccattcaattgaatcattaattcaattcaattcactcaacaaacccacccagcttcattcagcctgttttgcctggcaacactggatacggaagactccaaggattcccagtctgccagagaagctagacccatcctctcctgaccccaggcagaagaagagcagatggagggacgaagatttgggggaacccaagatgtggagattattgtgaactcagccttggggaggagggaggacaggcagggagtatttcctggaggaggaagatactggagttgagttttgcagaatcatcaagaattcacccagcagagtcacagtttaggggttgaggggaggcactcatggcagaggaacaggatgtacaaaggcctggaaaggaaagacagcctgaccactttgaaacaggacgaggaatatgtccttacagctggcctgggcatcatgggaccatatactcctcgaaggttaggccagggggctggatcaccgtgtattaatgcactcattcattcattcgttcaaaaaagcagtgttgtccccagagaagcctcagcttaatcccagccctgccctccaagtctctcccggtctggagggagaaccacagacagggccagaaatggctggctaagaagatcgtgaaggttttcatttttggggggtggagaggagtgggagatggggctggggacttacttaggaactcgaacgacgtattcagtgacattctggctgctagggccctgcggaaagaggaagcggtgagtgaggggtcgccgaggtcgccgtcggaacccccgaaccccgccaaatccacactcactagggccgccatgggcaatggtcagtggttccgatctggtccgacccgggttcctttcgtctcctctggcgtgcgcgtccctcgatcccggggaagccgccgctcggtgtcgggtctctgtgcctgagcgaggaccccaaccctaggcgcctctggcgctgggaaaaggtaaccggaagaggcgctcaagctactcggtctacgcttctgcggccgcctaacccggaagcgaaaccctcgagcagccgcgtcgcgatggcaaccttcttagcgactgtggccacctcagtgcgcagtcacttatgctcctcggcggctatggtcacctcaaaaggtccaccgcggtccctttttagactcagcaaacctaggccgagtctgagataaactaacgggcctctgtcgctggcgctcttgtatataacgcggttaacttcatcaaatgggggaccgccctctctcgtgacgtcagcacccaaggaccgtggggcatcctgggtgggaagagggagacgaatcccccttgcgggctcccaggcactttgcgcatgcgccttgccgctctggacctggggggcccagaaggccgcgtcaccatagcaaccgaggcctactcgggtcgggtcgaaccgccgcttggctccccatgggtctgtttggggttcatttcctccccctaccccgaaggggtggaccccgtcattcccgcaaaatgaccggggcggggacccttgtgacgttgagccgagccaggaggggtcagagcctgggcggggtcggggcgcgaccaccccaagagctgctggccggatgggtctttgcaagtccaagctgcccgagatgggcagggctctgaggccccaggagaagggtaacgtcgcgggggcggctggctggcttcctggggggaagggaaggaagctgccgagaacaggagggagatgcaggatcccctaccccgttccaggcatgcacacatcccccgaatcatggcagtaacacaactgcgcatgctcacggcgcaaccattcattgctccacttcgcaaatactccagcacctcctgggttcggggccccgcaaggtgaatctgtcaaaccagctccccacggaggattacagtgtcctctcgagggttacagtgtcgtggaagagacagagtcacagcatgggaatctacaacccaggaaggagcaggagaagcacagcggggctctgagggctcagagaagaggggaggtttcagttgggcactgagggatgcataggagttggctaagcaaagggaaggcgggcaagacacaaaagttgggccatgaactacagacaccgtcgatgtgtctgttttcatttatttctcatccaccactaaatgtcaggaaccgccaacccctaggaatataggaatgagggaggcagaaatagtccttgccctcatggagtgt[136 bp omitted]accccgtctctactaaaaatacaagattagccgggcgtggtagcacatgcctgtaatcccagctactcgggaggctgagacaggagaatcgcttgaacctgggaggcagaggttgtggtgagccgagatcgcgccattgccctccagtctgggcaacaagagcgaaactccgtctcaaaaaaaaaaaaaaaaaaaaaagaaggaaaagaaggaaaaaaaaagaacgagtaaacagagaagatcatgacagactgtggccattgctgtggaggaaataggtgtctcagacaaggagtgatggggggaagctctagatggaggctagagaaggccagatggaagttgtggccagaaggaactggggcaggcagggattttccaagcagaggaaacagcaagggagaagtgagtttcaaattcaaagaactgaagccccctggggctgggacaaagagaaggggagtatgggttggggctgggacagagggaaggggagtaggatatggggctggaacagagagaaggggagtatgggatgagactgggagcgtgggcaagtccctgcctctcactgaacctcggttccctccactgtaaaatgggatgatagagtcctcaggatgctttaaggagatgccgtgtgtgaagggcctggcctgctcaagttcacgtctttgtttttttttattttatttttttg[135 bp omitted]cacgcccagctaattttttgtatttttaatagagacaggttttcaccgtgttacccaagatggtctcgatctcctgacctgaagtgatctgcccacctcggcctcccaaagtgctaggattacagtgctaggcatgagcccaccgcacctggccacatcatttttttttttaaatggagtcttgctttgttgcccagtctggagtgcagtggcacaatctcggctcactgcaacctttggctcctgggttcaagcgattctcctgcttcagcctcacgaataggtgtgcaccaccacacccagctaattttttttgtatttttagtagtgatggggtttcaccctgttggccaggctggtctcaaactcctgacatcaagggatccacccgcctcggcctcccaaagtgcagggattataggcgtgagccaccacacctggcctcaagttcacatcttcatccaaagcggcacaaacacacaac[187 bp omitted]cggtggcgggtgcctgtagtcccagctactcaggaggctgaggcaggagaatggcatgaacccgggaggcggagcttgcagtgagccgagatagcgccattgcactccagcctgggcgacagagcaagactctgcctcaaaaaaaaaaaaaaaaaaaaaaagaaccatacccctaagatgccaccctacagcaagagtatgccaagagactttgtccaatgtcactcagggacacctgtgcccctacaggcactaacccatctccctcactcttcctgggcaccacagacattctcaagtcccccctggatggggggcccgggctgtggcaaagggacacagtgcaagaatatggcgaccaagtacggcttctgccatgtggggctggaccagctactgagacaggaggctcaaaggagcacgcagcggggccggcagatccgtgacatcacgctgcaggggctcctggtgcccgcggtaggagctcatgggaggggttagggcggaaggggtaccttgggacaaccacccaccaggagggctcacgggacccagaaggttgcaacttcccatgtggccattgccttgctgcactgaaccttcatttccttatctgtgaaaaggggagatcccatcaaaaggccgtaggggtctggcccagtggctcacgcctgtaattccagcactttgggaggccaaggcaggtgggtcacctgagttcgggagttcaagagcagcctgaccaacatggagaaatcccatctctactaaaaatacaaaattagccgggcatggtggcgcatacctgtaatcccagctactcaggaggctgaggcaggagaatcacttgaacccgggaggcggaggttgtggtgagctgagatcatgccattacactactccagcctgggcaacaagaggaaaaccccgtctaaaaaaaaaaaaaaatcactcactagggaagcgctcactgtttggtgaaatggagggtgccccattcatgaattgcaaataaagatcaatttgagctaaaaaaaatcactcaaggacaggcacagtggctcacgcctgtattcccaacactttgggaggccaaggtctgagcattgcttgagcccaggagtttgagaccagcctgggcaacatagcaagccctgtctcttaaaaaaaataaatttatttatttgagatggagtttcactcttgtcgtccaggctgcagtgcaatggcgtgatctcggctcactgcaacctccacctccctggttcaagcgattctcctgcctcagcctcccaagtagctgggattacaggcacacaccaccatgccctgctaatttctgtatttttagtagaaacagggtttcaccatgttgcccaggctggtcttgaactcctgacgtcaggtgattcactcgcctcggcctcctaaagtgctgggattacaggcatgagccactgtgcctggactaaattatccattaactaatttatttattgacacgagtctcactctcttaccccaggctggacagcaatggcatgatttcggctcactgtaacttctgcctcccgagtttaagtgattctcatgcctcagcctcttgagtagctgggactacatgcgtgcgccaccatgcccagctaatttttgtatttttagtagagatggggtttccccatattgcccaaactgctcttgaactcctgatgtcaagtgatccacccaccttggcctcccaaagtgcaaggatgacaggtgtgagccaccgtgcctggtcaaaacaataaatttttgtttgtttgtttgtttgttttttgagacggagtcactgtgtcgcccaggctggagtgcagtggcccaatctcgactcactgcaagctccacctcccgggttcacgccattctcctgccgcagcctcctgagtagctgggactacaggcgcccgccac[139 bp omitted]acattttaaaaagttagctggtactgcaggaaaaaggcatataataaaaatgaaccaagaaaaattttaaaagaaaaaatttagctgggcatggtggcatgaatctatattccagctacctggaggctgaagtgagaggattccttgagcccaggaagtcgaggctgcagtgagccgtgactgcaccactgctctccagccgggaagacagagcaagaccctgtctcacccaggcgcggtggctcatacctataatcccagcactttggaggccaagacgggtggatcacgaggtcaggagttcgagaccagcctggccaacgtggtgaagcctcttctctactgaaaatacagaaattatccgggcatggtggtaggcgcctataatcccagctactcgggagcctgaggcagtagaatcgcttgaacccgggagatggaggttgcggtgagccgagatcatgctactgcactccagcctgggcaatagacccagactcagttaaaaaaaaaaaaaaaaaaaaggctgagtgcagtggctcacgcctgtaatcccaacactttaggaggccaaggcgggtgaatcacttgaggtcaggagttcaagaccagcctggccaacatggtgaaaccccatttctactaaaagtacaaacaaacaaacaaaaaatcaaaattagctgggcatggtggcatgcacctgtaatccccagctactcgggaggctgaggcaggagaatcgcttggacccgggaggtggaggttgcagtgggctgagctcacaccattgcactccagcctgggcaacagagcgagagtctgtctcaagaaaataaaaaatggctaggtgtggtggctcatgcctgtactcccagcactttgggaggccggatcacctgaggccaggagttcgagaccagcctggccaacatatagtgaaaccccgtctctactaaaaaatacaaaaattagctgggcatgatggtgcacacctgcaatcccagctacttgggaagctgaggaaagaggatcgcttcaaccccggacgcggaggttgcagtgagctgagattgtgccactgcactccagcctgggcaacagagtgagactccatctctttaaaaaacaaaaacaaaccaaaaaaatcactcaacagaattagctagtatttatttcctttgtcaccccgtgaagccacttcctcacccgaaaaatgaaggggaccccagtacctgcctcataacatggtgatgattaaggtacaagcccagcactggcatgcctccttttcagaagcaggtttttgttttgttttgttttgctttgtttgaggagtctcactctgttacccaggccggagtgccatggcaccgtctttgctcactgcagcctctgcctcccgggttcaagtgatttttgtgccttagtctctcgggtagctgggattacaggtgtgcaccaccatgcctggctaatttttgtatttttcgtggagacagggtttcaccatgttggccaggctggtcttgaactcctgacctcaggtgatctgcccgcctcagcctctcagagtgctaggattacaggcatgagccactgctcccagcgtagtttttggatttttagtagagacagggtttcaccatgttggccaggctggtcttgaactcctgacctcaggtggtccatctactttggcctcccaaagtgttgggattagaggcgtgagccaccgcacccagtgaagaagcaatttctttagagcattgtagcagactcagaatccagggcgccaagcagggtatagtcaccctgtcttcacctaaagtccagatggaggaatagaacttgacagggagagccaccttagaaactgatctccccagggtgattcggcggggaaagaagggctcccgggtgctgaattcacccactcccttcccagggcatcatcccagatatggtcagtgacaacatgttgtcccgcccggagagccggggcttcctcatcgatggctttccccaggaggtgaagcaggccatggagtttgagcgcatcgtgagtggccctgaagtgtgggtgtgggtgtgtgcgtgtctgtgtgcatgtgtggaggtgtgaggccatccctccccgcccaccttggataaggctgcacagactagagataagaaaggctgagatacaaggagagaggagatgctgagagggaaatggagtttttttgttatttatttatttatttatttatttatttatttattttttaggcagagtctccttctgtcgcccaggctggagtgcaatggtgcaatcttggttcaccacaacctctgcctcctgggttcaagcgatcctcgtgcctcagcctcctgagtagctgggactacagtaagcacccgccaccacgcagggctaatttttgtatttttggtagagatggggtttcatcatgttggccacactggtcttgaactcctgacctcaagtgatttgcctgcctcggcctcctaaagtactgagattacaggcgtgagccaccatgccggcctgttttttttgggtgttgaggacagggtctcactctgttgcccagtctggagtgctgtggtgcgatcatagctcactgcagcattaaactcctcccacttcagccccccaagtacctaatttttttttttttctttaagacagagtctctctctgttgcccaggctggagtgcaatggcgtgatctcggctcacggcaacctctgcctcccgggttcaagcgattctcctgccttagccccctgagtagttgggattacaggtgcctgccaccacacccggctaatttttttttttttttttttttttttttgtatttttagtagagacagggttttctccatgttggccaggctggtctcgaactcctgacctcaggtgatccacccacctcggcctcccaaagtgcttggattataggcatgagccaccgtgcccagccaagtaccttttttgtttgtttgtttgtttgtagacataggtttcctctatgttgctcaggctggtttctaactcctggcctcaagcaatccccccacttcaacctcccaatgtgccgggagtatgggcatgagaccctgcacctgcctgggaaacagagtgttctattatcaagggaaagtcagggtgttggaagtttctagaacccagatgaggagctagggagctctctgagggcagggaggaagtcatttcagtatcttcctgcccagttcctggcatgtggtgggtgaaccatttgcccactgaatagcgtgtgggtttagcatcctccctaggccatagagagagattcgtgttgttcattcatctgtttatgcaaccacctgtccccgaagtgttcttagagaaagccctgccctcggggctggggatacagagtttacaagatgccgacatcagagtgagaaagagaggcacgaagtcatgcaaaacaaagacatttctgggctgggcgcagcggctcatgcctgtaatcccagcattttgggagtccgaggtgggtggatcacctgaggtcgggagtttgagaccagcctggcgaacatggtgaaaccccctctctactaaaaatacaaaaaaaattagccagtcacggtggtgcgcgcctgtaatcccagctactggggaggctgagctacgaggatcacttgaacccgggaggtggaggttgcagtgagctgagattgtgtcactgcactccagcttggtgacagatggagactctgtctcaaaacaaacaaacaaataaaacctacaaagacatttataatagcagttaagtgcggcgaagaacagaaaacagaatgacatttgggaggaacgagagtgtgctcttttgggctgggtgggctgggtgggctggatggtggcctccctgacgtggatacactggggccctgagtggaggatgaggagctggtgctgggaaggttggagggaatttcttcaggtgattttcacacttccgcgtggcttttgtgcaagcagctgtctgaacacgtgaacagtgacgatactgtggactgaacaaggagggatctttttgattctgtttggaaacagttgagcaggaaaagagaggccgggtgcagtggctcacgcctgtaatcccaggactttgggaggccaaggagggcagatcgcttgagcccaggagttcgagaccagcctgggcaacataacaagacctctgtgtctacaaaaaaaatttaaaaatgagccaggcgtggtggtgcatgcctgtagtcccagctatttaggaggctgaggtgggagaatcacttgagcccaggaagtcaatgctacagtgagatataattacaccactgcactccagcctgggtgacagagcaagacactgtctctaaacaaacaaacaaaacataaaaaaacaggaaggaaaagagaagagaaactgtctgtcaggctacagaccttgaggcttctctgaggcttgttggattccacttaaaatacctttcgattccagaccagcctgaccaacatggagaaatcctaactctactaaaaatacaaaattagccaggcatggtggcgcatgcctgaaatcccagctacttgggagactgaggcaggagaatggcttgaacccgggaggcggaggttgtagtgagccaagactgcacccttgcactccagcctgggcaacaagagcgaaactccgtctcaaaaaaaaaaaaaaaaccttttgaagaagcactttgatggaatcaaaggtcatgggcgccagggcagctgttcccacatgcaggtgggggccctgccctttgttcacacctacattcaaggaattctgttgggctcataattcgttgtgatggggttaaaggacaaatctcaggcccccgcctcaggactgggagttctccgagggcaaaggtcgggctcattcatttctatgcctgccccagcctcaggccagtgcccggaagaaagcaggtccccagctccaccagtggcttctaggtctcagaacagaggctacagaccgtggcatgggcccctttgggtccaccaaagtgttcggtttggactttacagcattttgcattttcctttttgggttcacggccaacattcgacaacagggagcttccacatcaaaactcccagcttctcttgaaaaccgactgacttggcaacgcagggcctgcacgtccccatggcaacagctgcgtgaacgcttcctgagcttttattgagcccagcactgttctcaacactctgcatggatgaactcatcttccggaacgttccaggcattagcatcccgatgttttgcagagcgatcggggagctgcaatagggtcacacaatgtaggtggggaaggcagggcagaagcccaggcaaccccactccttgg[138 bp omitted]tggccaacatggtgaaacctcgtctctactaaaatacaaaaattagccgggcgtgatggtgagcgcctgtaatcccagctactcctgaggctaaggcag[136 bp omitted]tgtaatcccagctactcaggaggctgaagcaggagaatctcttgaacctgggaggcggaggttgcagtgagcagagatcgcatcactgcactccagcctgggtgacagagcaagactctgtctcaaaaaataaataaataaataaataaataaataaataaatagggtcttgctgtgttgcccaggctggtcctgaactcctggcctcaagctcccacctcagcctcccaaagttctgggattacaggcgtgagccaccacgcccagcctccaaggccccaattttaattcctttactgtgcaactgactttgtcacggtcactcctagaggcatttgagtctgcagtgtccctgccttagagtctgtccagaggttcctagtagcacagcatccctggagcctgaaacacagaccatgcctagccccatctgggaccccagctggctcatgcgtctttgtttggtgcattttggtgaagcaggtctggcttgatgatggatccccaggatggagatctctatgcacaagaacacaatgtgcaggaagggtgtggtgattccccttatgattcccactgtcctgtatactccagacaccatggggggccgtcctgggtgaacccactgaaatccatgggaagccaaggttggacacagcctcagcattccagggagactctcgcccctattttacagatggggaaaccaaggcccaaggaggaagggttgcctcctcttaatttttagggctgggtgaggtggctcatgcctgtaatcccagcattttgggaggcagacgcgggtggattgcttgagcccagaagttccagaccagcctgggcaacacgacaaaaccccatctgtacaaaaaaaaaaaaaaaaatacaaaaaaattagctaggtgcagtggcaagcacctgtggtcccagctactagggaggctgaggtgggagaactgcttgagaaccaggagcgttcagtgagctgagaatgcaccacagcactccagccagagcgacaggagtgaaaccctgtttcaaaataaataaataaataaaataagtggttttttttttttttttttctgagagaagtctcgctcttgcccccaggtctgagtgcaatggcttgatctcggctcactgcaacctccacctcccgggttcaaacaattcttctgcctctgcctcccaagtagctgggattaatgcacctgcgaccatgcctggctaatttttgtattttttgtagagatggggcttcaccatgttgggcaggctgttctcgaactcctgacctcaggtgatccgcccgtctcggcctcccaaagtgctgggattacaagtgtgagccaccgtgcccagccataaagtatgtattttttaaaacctttttattaattatagactcacaaggaaatgctgagatag[137 bp omitted]tcctgggttcacgccattctgctgcctcagcctccccagcagctgggactacagacacccgccaccacacctggctaatttttttgtatttttagtacagacggg[148 bp omitted]ggttggagtgcagtggtgcgatctcagctcactgcaacctccgcctaccgagttcaagcgattctcctgcctcagtctcccgagtagctgggactacaggcatgtgccaccatgcctggctaacttttgtattttagtagagagggggtttcgc[139 bp omitted]tcccgctttatttttattttttatttttttttgtcacccaggctggagtgcaatggcaccatctcagctcaccgcaacttctgcctcccaggttcaagcaattctcctgcctcagcctcctgagtagctgagattacaggcgcccaccatcatgcctggctaaattttatatttttagtacagatggggtttcaccatgttggccaggctggtctcgaactcctgacctcaggtgatccacccaccttggcctcttaaagtgcttggattacaggtgtgagccaccacgcccggcctaaactcccactttttacatttcttgctcagtcctggaatgggtcttttccagaagcccttttcgtggtgcaaaattagggttcaaagaatactcgttgctattgggttgtcatcgtttctggatcttcccagtgaacagagctaagaaacacatactcttgaaagagaaaaagaaatcacaagttcattctgatatttcacgttcacgtgacacttacagtgttgttccttcccttttctctttccctaaaaattttggttcttaataccactaacatactcatttgcatcataccattagataccaaatagtttgaaaacaatatgccaacattaactactaagaataaaactatatgtgttgaaacatcactatgtaccctatacacatgtacaattattgggtcaaaacaataaataaaagaataaaattagaaaaggaagtttaagatttctttatagctctcattttcctttattattattatttatttattttagttttcttttttgagacagagtcttgtcctttgtccaggctggagtgcagtggcatgatctcggctcactgcaacctctgcctcccaggttcaagcgatctctggataatttttgtatttttaatagaaatgggatttcgtcat[139 bp omitted]attggttccaggatctgtctcagataccaaaatccatggatgctgaagtttttttgtttgtttgtttttgagacagggtctcgctctgtcgccaggctggagtgtagtggcgtgatctcttctcactacaacctccgcatcccgggttcaagcaattctcctgcctcagcctcctgagtagctgggattataagcatgtggcaccatgcccggctaattttgtatttttagtagagacagggtttct[137 bp omitted]ccaggtacggtaatcacacctgtaatcccagcactttgggaggccgaagtgggagctcaggagtttgaggccggcctgggcaacatagtgagaccccatctctaaataaattacatattcaaagagttaaataataaaatagcatagtatttgcatagaacctatgatcaccctctcatatactgtaagtcatctctagattacttgtaatacctaaaacaatgtaaatgttatgtaaatagttgttatagtgtattgcttagggaataatgacaaggaaaaaattctgggctgggcaaggtggcccacgcctgtggtcccagctactcaggagagtgaggtgagatcgcttgagcccaggagtttgaggctacagtgagctatgattgcgccactgtacttcagcaagaccctgtctcaaacaaataaaaaaaagaattttattttggacattgtgaggtatggggaaaaaaaccagaccctgtcttaaaaaaaaaaaaaaaaagtctatacatgttcaatacagaggcaacttgttttccaaatattttcttttcttttttcttttttgagacagaatttcccttttgttgcccaggctggagcgcaatggcgcgatctcggctcactgcaacctccgcctcctgggttcaagcgattctcctgcctcagcatcccgagtagctgagattactaccacacccggctaattttttgtatttttagtagagatggggtttcaccatgttggccaggctggtctcgaactcctggcctcaagtgatctgcccaccttgtcctcccaaagtgctgagattacaagcgtgagctactgcgcccggcatccaaatattttcagtctgaggttagttgaattcacagatgcagaactcacgcatatggaggaccaactctatcccactatagatgcaccataataaaaatacagggttggccaggcaaccctacataatgaaacctaactgaaacaaatgacccaactatgtatctattgcattccttaattacacagaaaatatatatatatatctttttatatggagtcttgctctgtcactcaggctggagtgcaatggcacaatctgggctcactgcaacctccgcttcctgggttcaagcgattctcctgcctcagcctcccaagtagctgggattaaaggcacgcaccaccacacccagctaattttgtatttttagtagagatggggtttcaccat[139 bp omitted]ccccccactcagaaggctgaggcgggaggatcacttgagttgggtagttcaaggccccagtgagctatggtcacgccactgcactctatctagcctgggtgacaaaagtagaccttgtctgaaaaaaacccaaaaacccataaccagcattcacaagaggtttgggcacagatacaacaatggttagacctggctgtctggggattcctcacgctatcctcttctgtgtgcgtttgcagtatttcattacatcaacttcttttctctgttgtccagactggagtgcagtggtgtcatcttggctcactgaaatctctgcttcctgggtcaagcgattctcctgcttcagtctcctgagtagctgggtctgcaggcgtgcaccaccatgccaggataatttttatatttttaatagagacggggtttcaccatgttggccaggctggtctcaaactcgtgacctcaaacgatctgcccgcctcggcctccctaagtgctgggatgacaggcctgagccaccatgccagcctgtttttttgttttttttaactttgccatatatccatccagaatatctcacatcagtgtcaagagatattccttgtttctttttttacagctgtgtagtattccattgtgtggccacgccattgtatattcagctaatctcctatgggcaataaattactttcaatcctttgccactacagacaatgccacattaaataataacctttgcatgtcatttcacctttttgctagtatccttgaaatagattaggagtggaattgctggattaaagagaaatgcataattttgctagccatcaccagattcctcttcattttacatttacagtgagacctacagaacatgctgccaaggttttggatttttgtcaacctgtgtaggtgagaagtggtatttcagtgtggttgtaatgagcatttctctggctacaattgagttttaatatcttttgcaaagtttaagggccaagctgggcacagggacacatacctgtagtcctagctattcaggaggctgaggtgggagatcgcttgagcccaggagttcagggctgcagtgagctatgatcttgccactacactccagcccaggcaacagagtgagaccctgtctctaaaaatacaaaaagtttgaaaggtgttttgttgtcttcttcagtaaactctttctctctctctctctctctatatatatatatatatatattttttttttttttctgacaggttgttggctttttcctttcttcttttcttttctttttttttgaggcagagtcttgctgtgttgcccaggctggagtgcagtggtgtgatctctgctcactgcaacctctgcctcccgggttcaagcgattctcctgcttcagcctcccgagttgctgggactataggcgtgcaccaccacgcccggataattttcgtatttttagtagagatggggtttcactgtg[135 bp omitted]gtttgggaagactcagctcctttataatgttgagtctttctatccaagaatatatatctgatccttctgtgcaagtatccttttgagtcacttaagaatattttactttttaggctgggcgcggtggctcatgcctgtaatcccagcactttgggaggctgaggtgggcagatcacctgagctcaggagttcgagactaccctggccaacatggcgaaaccccgttcctactaaaaatacaaaaattagctgggcgtggtggtggctgcctgtaatcccagctacttgggaagctgaggcaggagaattgcttgaacctgggagacggaggttgcggcgagccgagatcgcgccaccgcactccagcctggttgacagagcaagactctgtttcaaggaaaaaaaaaaaaaaaagaggaggaaaaaagtattagaaccatatttgcttgcagtgtgcatgcctcatagctttcgaaggagacacaggagcaggtaactaggctgcctccagggagagtgaccctgggtggttggagatggcgagatgcttcactgtgtgtgtgtgtgtgtttggcagtgaatgtcctgtcctctccaaaaagtaaatacgtaaaacttgagctagaaaaataaaacaaggttgggcatggtggctcacgcctataatcccagcactgtgggaggccaagacgggaggatcacctgaggttaggagttcgagactagcctgaccaacatggcaaaatcccgtctctactaaaagtacaaaaatcagctgggtgtggtggtgtgcacctgtaatgccagctacttgggaggctgagccaggagaattgcttgaacctgggaggaggtggttgccgtgagctgagatcgtgctattgcactccagcctgtgcgacagagtgggactccatctcaataaataaataaataaataaataaataaataaataaataaataaaacagaccagggtggcctgattattccttacgtgcccaaataaataaataaataaataaataaataaataaataaaacagaccagggtggcctgattatttcttacctgcccacgtaatcctagatacctggtttctggggaagccggggttctggagccactgtgcctggtccctccacacccagcccccttgttcgggttcctaggtgggccaggcccccagcgtcgtcatcgtgtttgactgctccatggagacgatgctccgacgagtgctacactggggccaggtggagcaccgggcagacgactcggagctggccatccaccagcgcttggacacgcactataccttgtgtgagccggtcttgacctaccagcgcaataacctgctctgaaacgtaggtgctccccgcttctggctcactgcaccccaacccctagggaacaagtctggctttaacagtccagggtcacccgggcctggtcctcgctttcctaccaggtaacctgggggattcccattcccccaggaaatgccttgagaacccagccttggctcacgtgggaaggcaatgggacactggtggggcctccctgcacgccctcacacagcagtcagcaacacaagctttcctgaccctgtcccctctcccttcacgtgcatgcctctgggattttcccagggtctgagcgggagagggtggtgtccctgccgtggggcccagacctgacccctgcggctcccctttctctagatcccggcagaagcagcaccagagaacatctttgccaagtgctgctctgtcattgagagtctgcagtgagacagaggggctgggggtgggccttgcccctcaccggaacccgtgcagtacgtgggaagggtgcgtacctaggaggtgagacctccagaaagggggaccgatgccccctgtgattccagagcaacaggttccctttcccggggtctgtttccccaccagggaggttggccaggggccaccaaggaacatgccccactgggccaggtgcctggcacacctgcatgggtcaggggactgtcaacagccccccctagaggccacagctgttactggctcctgccggggctatcaccaggcccatgagcccaggacatctaagatgaagcgagttttaaacgctggcattcagccacaacctcagagaccctgcagctgcatgcggggctgcaagacacctgcccaggtccaaacagcttgggtggcccctcggtgccctctcccacctcacatccggtcccatcacccagcgagcactgacgcgggcctggctcccacctcagggctctgaacgttaacaggccagaggacctcctgtagcaacagcccatccatgggaacgccggtccctgaggccctcctgagcgccttgctccccaaggtgctggagggaaactgggtaggggaagacagcagtgctgggctcagccagcctccccttcccacatgggaaggggaaagtcttggggggccacaccccactctaattggctgagacttgctcaacttgtttcctctcacaaacacaactgcggccagcacgcagtcttttttaaacaaaaagcactttatttaacaaaaaaaaaaaaggggggggggcacggttaggaaagcacattgagcctgaagaaaactattttatatttttcttaaaaaaaaaaaaacacaaagtttgtaaatttcaatcaccattatcaggctttttaaacaacatctataaagaacaaacatccgcttcaaaactacagggagggaaggaaagggggggagacagacagcacccgcagacggggaggttttgttatcatttatttgtgaagttaaaaacgagcgataaaaagtaaaaactgccatacaattttttttgttgttctcattttgttttcagtttcaatctcctcttgaacagatgaaaagacaacagaccagtcctgggaggggggacgggcggggccgcgggagctgagccagggcgggagggagagaagagggggcttggctgctgggggaaggggtcctgcaatacaacacctggtccaaggaatgttccacctctaactaaaaaaaagaaatagcaagagtgacttttttttttcctttttaaaagtttattttaaaaacaagagggccgagggtgggagaaaatgaattgctttatcctcagagaggcaggttcaggaaggctggggggtgaagaatagagactttttaatatatatatatataattttataagttctgctttgctctttgtgtttttaatttttaagtttttttttttttttggcagagatttagatctcgctatcttctctggctggctcaacatggaaggatcccaattttgaaagaaaaagcatgtgagacacagaacaggcgagagagtgagggcccggcatgcccccaagtcccccccaccctgcttgccgcgagggctccccagtactccccacggcagccatcgctctctcgccaaacaaaacagaagcccccaaacagaacaaaatggaaaaaaaaaagatttttcacagatgaagaagttcacattcattcgattcattgagcctgcggagagggaagagataggaattggtcactacggggagggaagggtgggagactagggggcggaagagaggaggggctggaacaccgtggggggggccaggaagccccctcccaaacctgcgctggctcaggctggaaggacgtgcttgttaactgtctagccaggtgctcgcgggactcgctgaagtcacgctgctccctgatggagaaggagggacagagcaggaagagaggagaggggccgcggagggcggaggcgctagggtcgtaggggagctgccctgtctccggagggcggtggctcccggcgcagcacgacgacatgaacaatccagagatcatggtgtccccacaacacccctgtgaggtaggttggaaggtggcaacgatcttcacgcccacttcacagacaagcccgggacacaggcaagcgcgagcgcatgggaggctgagcccggcggggcaggggcctgggccgctccccgcgtccccaccagtccctgccagagccaggccgcctgcaacacagtcacttggacacaggaaaaaagatcatgggtttaaaaaataaaagaataaaaagaacaaaaaccaaaaaagtgatgcagagaaggggaaaaaatagacgttttcttcccaagtggccagattgtgagcgaggtggtggcggccgggccggtgcccaccgtccgcgctgtctgcctgccccccgactccccagcagttcagaagtcccgcctgcgagtctcagcgctccccagcatcacgacagcggcacacaggaacaagcagccggcgcagggaggcctcttcgtttaacctctggacccagcgaatgcttccctggcggtgcgtggggactcccggagacctccggccacacggcccccgctgcaggcatcaagggcacaccccgcaggggaaggggtttccggcgctacccactaaggcaggatggacggtggccgggggttggaaggagaaaggaggaggaggagggtggcaattcccacttgcctgctgctgtccctgctgcgtgggcggcggctgggggccgccaggacctggggtctgtccgtagtaagcggcctgctgtctgtaatattccgcccaggcggcactgtagtctggctgggagcctgggggagctcctggaccccctccggtggccacttgcgctgtgggtggacaaaggcaggtgagaggctgtgggtgagggctgcccctgcccctgtccccgcatggtggccactcaccttgcttcttgtagtactcctcccaagccttcgtgtagtcctgctgtgggggtgctccgggctgctggggctgctggcctgtgcgggcgccgagacaggtcagaaaccactcccccggcagggctggagcccccccgccaccctgcagactcaccgatctttttgtaatactcttcccaggccttagtgtagtccgactggccggtgggtgggggctgagggggctcaccctgagccggtggggccgcaggggccggtgcggggccggggacggggcccgggggctgctggtagtagtgtgagtagtaggcggcccacgcggcgttggggtccgcggccgctgcagctgctttgcctgcaggagatacctcgggtgagacggggggacagaacagggcctgccctccgccaggtggcccatcacttacttgggtcatgaggagcaggcggctgccactgggggtaggtattgccccagccctggggtgggtactggtgaggagggggccccccggcactgcaggagagaagaaagggatgcttgagcagtggtgcgggggtggccgcagccggaccacctggggtggggatgtttttcagtggggaggcgccagagacccagaccaccaggctcaacggggcgcctgggaaaggcctagacaagaagcaactcgaaggacgcgcagcgtcagcttgaggacatgaaagaagccgcgaaacttgcacgtgcacagagggatgctgaaaggcacatgctctaccagtagacaggagagggcctgttgatggtatccacaaaaatgggctggatgaggccccccgcctgcacttctagggaaagggaaatggggtctgctattcttcttgccagctcagtaagcccccggcctcaaaacccaggaggcagaggatactcactgtgggggagccccgggtggcccctggttgaagggcccaggattgaagggccccattgggccagcagggcctgggccacctgggcctggtccaactgggcagagaggaccctagaaggaaggagagtaaccaaggtaagtgggctgggatccgggctgtgagaccaaatccccagagcccgccccaacccacctcgatcttttcctcgataagctgcttggcgtggtcaatctgctggggtgaaccccggatgatgaacaacttgaagttggggtccccgttgggtggcagctgccgggagatctctacgaaggctcccgtctgctggtttatggctttcacattctcgccacctgcagaaacgcagaaggtgaaggtggcctgcagtgatggcccagggaagagggggcaagggatagggtgcagggggccacactcacctcggccgatgaccagcccacacttgtgagtggggatggagaaggtcatctccccgccagggggaccccaattgccttggcctcttcctcggcctcggccccccgggggcatgcctggaccccctggaggacctgggggaccactctgcaagacaagaggaggaggaggatgatgaaccctggaagccggtctggtcttgcactcccctggaggccctgccagccccttcagcacccggggccacctaccctgaggctctggaggaggtcgttgatgatccgggctgcgtgctcgcacctgtctgggggccccattatatgagcaatcttctcgggccctgtcccgtcatctgaggccagcaccgagagagcagagacacaagtttaaaagaagagcccaccccagagccctgcaacgccgcctccagcgcagacaccacgccggcctgagatctcagacgcgctgcgccgctcccagcctccactcgctcagggattgagggggaggcggcccacattcccagagaaggaaacccacggccaagccaggaggtggctcaagcttcttccagcacacagcacccccagcactgagagattttacagaacaataaatctctgaaaagccagaggggcccttctccccacggcaggcagctcagagactgcctgaggactggcaagagcccagagctgaggtggagtgccctgatccagcctgcggggcacccagggctgtcctgtcaggataggctccatcgtagggggaggaagaggagatctgatagggataggaacacacgttccccctggatgtggaaagccctcatgtgtctgtcccagagaagagaagggactggccatgttctgacggctggactaagagccgtgaggtgctatggaggccacctggctgaccacggtgcccagctccctcagagcctgcctcccaaagagggtgggggtgcactggccaggggcagggtgggccaggccctgaccttgcttgaactgtatccgcacgccagcatcattctggatcttcttgatcatctctccactccggccaatgaccacgccaacagaatgcctgggcactggcacctggggagggaggcagcagcgtcagctcggcccgcagctctgctgccctctgctgcccactggccacaaggagccactcaccccggcccctccctccactggcgggggagaggggggtgaaggcagggcccacactcacatcgatgcctccgccaatccgagatccgtactcattccggtccccaaagccgccttggtcacgttcccggaggatgtccatcaccatctcacaggcttgctgcaaacacacaggaagcagcccccatgggtgagccctgctgccccacacccccccacctcctcgggggtgcgggcctcaactaaggacccacgaaccctgggtgagcccagcacagcaccctactgagctctctacctgccactttaatggggaggcactaccagcagccccgtttccagataaaaaagcagaaggtcagaggtgaggccggtgcctcacacacacaaagctgggagtcagttcagggccatcctacgagccagcgctcttgcaagcctcttggtgttatgaccgactgttcacatatctctctggcggaatgcagaccccgagaccgctggccctgcccacctgcccgtgcctctccagaaccccctccaccaccccagggcgtgctcacctgcactttgtaaggatccccaatgatgcggagaggtttgtccacattcgtattctgagatccgtcctgaattaagatcatcttcactccagcgcgttcctttacaagcaaggttaaccgttagtgctgggctctcccaggacttcctgggctgctgtggtggtggcggtggggtgtggcacacggatgcagaggaagctgcccaggtgctgccctcacctgcagctgcttaatggtctccccgcccttgccaatgaccaggccggccttgcccgcggggatcatgatctcctgcacggtgccgttctggcccccgttggcgttgtcgtggaactgtcctggggggcccccacgaccccgagacacaatgtcatccagcatcatcttggctttcctgggaaggggaggagcgggggatgagcgggtgccaccgctggagaaaggtactggtctggtggcccacccagctcaaagggaaggcgaccccagagtgtgcaaggatgacagggaagaggggccagtcacaggggctgttcaggctccaggttccccaggtcttgggctgccggggaatcagcctcatgttaacatggctgtctggagatgggggcaagaatggaggacatggcgtgcaagttgctcccaactttcaattcaaacggacagagcaggcttctgcctgccccccacatcacaatgagaggccctgtggggacttactggacagattctggggctcctgtcaaggacacactgcgctcgggtaggccaccgctgtctgaaaagaggagatagagtcagtgccctccctggcccacaggcagagaaaggcctgccttggacacgaggaaactttcagaacaaccaagggccacttctgtcccattcagtgcctgacagatcagtttacttcccctaaacacctgggaggctgctcgatgcaaggccaaggttgggaagagatcccagaagggaggtaggactttaagggaaaaggatgaggtggagggagttgcagattccagaaggtccaggagccggccacccccactaccaatgatgaccagagccgcttctatagacaacacgtgctacacgcccaaggaagcctcagaaccccctacccagcaggctttctgtagctcaggactctgagattcgaaaggtaactacattgcctgagagcagatgtgcagccagaaccgggatttgctcctgggcctgacctcagagtgacccctctgtccaaggcaccaccctgtctcacgcagtcttgccggggtgctttcacccacgcggcaggtcagtgcagtgcgtcgaagctcggtgtctggaaccaggcccctgtgcgaaatgctagccctgccacctcagtccatacccacccactgaaaataaaaaaagtcacagctgtgccccgtgggcagtactagtggagtgagatactgcactgagcctggtccgtagtaagcaccaacaagcgccagctcgcttcctgtccacagtccccgtggaaattaagtaattaaaggaaagtgcaaagggcccaaccctggcccccactctggcaggaacctgacgctcttatacctggagaaatctgtactttgcagcctgaatcctgttggattttgttaatttgttcacctcctctgccaatgactggatggagaaagaaggagaaaagcaaagcgtgatgagggaagggagcccaggcctcaggagactgtgtggccggggccccagcccctctgacgttcaggagggcagcagtcctctagagagctcctgtcctctgcccagaggggacgaaggagggacaaatgagaacagcacataggagccctctcagaccagggcttctgggctggcaggagctcacaggacacttcctcctggggaagagtgggcctccccacccaaggtgacccacactcactcaggcccaccatgccgtctgggaccctgtactcttctgtcattgaagtcctgtaaagagacacgccaaaggtcagtcctcaagtgggaagggaggaggacagcagctctggaaggtctacttgaagccaaggccaccataggtctaagcagagtctgaccacacaggccacaaaactgccaaggcctcagtttccccatctgtgccccgagaggcttgctctgggcattgtgggccttggcctggtgccgtcccattgattcagggcgagagggagcactgagtagcaagctgacagtcactctatgtctctcagttctaaaaagctggctgtatgtccttttcatcttattttcctagtattttatgaaactactggcccattaaaaacaaacaaacaaaaaatgacccctgacaactgccctgtgtcaggttcacctcagtccatctggtggggcaaagaggtggcaaagagccctgagctccacagcactgagtgggatgggcacttgcagatgtgtgagggagggaagcaaggccctcctagcctcttccaggaagacgacatttgtgctgctcagagtccccaccccagcggaggaagccatagggtgcggagaccaccctatcactacagtgactgccacgacgctcccctcccacagcccttcagacaaggggtacgaggaacggacacagctcctctgcctcattcccgtctgagcactctggtcaactggcactgggggataaaacctgagagatgtgcccccagtcagagccctcccaagtcagcagaaaggccagtctgctggccaacagacaagaaagcagtgtgggccccaccatggcttaccttgggggaggatggatgggtccaagttgagaactgattgctgtagagagaaaacccaaagcaaagactggcttagctcctcctcgggcacttggcactgcctgccccgggtcagtgggagctgagcccggcaccacggtccccagcctgctccagtgcctcatggatgctgtggattcctccccataaaagcacagagctcatctccctcaatttcagggttcctgggatccctcaaacgtatgggccccagaatgaagcaccaggggcctctgtaaagagctgccacctcctcagtgcttccagctcctgactcctgaaaacctcaaccctctgaagccacatatctgccaccagaccccctggacttacagtctccctgggaagccagcttcttgctctccggttgatctgggaaagagagaggatggcagatgcagcacccacccacccacggccgcctcgaacctgatgctggtgccacatgtccaaggtaaacagtgcccctcggcccccacccttaacaggagctgagacaggagcccaggagagactggcccctgagggaggccagaccccgccaattccgccaccaacgctcagagtaaaaaagccttcagaacacgcaaccaccaccaggcacctgagtcctcccggtttaggacaggacctgcctctagcagggagggtgtcgtggataacagtggagttggtcagggttgatcatccgctacttggggtcacactacgcaccccagagctgggccaacttcacatcaagcctcagtaactgctccaggttgcctcagcctcccagaaagggaggaatcatcttgggaacttacaacttcgacccagtcacaatcaatctgccctcctctctgccacctgatacctcaggatggcagacggaacaagaagaattaacaaggccgggattgctgaggttttaaaagaccaaacaacagtgacacccaccccctctgaaccacactcaaacaaaagcacctctttaggcccccagcccttcctcctaagctaaaggcagcagcagggagttacctccatcttccaactgtctcttttggcccccaaaaccaaaatcaggagtgctgttattcactgtcgtggcagcatcgcctccaattttggctgcaatctagaataaagtagtaagcacagaagaattaccaccaaaaacaaccctccatggcacccaggtcaacttctcagaacatctcctggacacgaaagcccatcaggtcttggtgtctggccctccaacttagggaagagtcagttggttaagacatcctaggagttttgaacctaggcctcaaggttctcaccagttaactgggaatatcaaaattcccctcttcccttctcctgggatttgtgtcttaattgtggccagcccataatccacactgacttcgttctaggggtgacaaggaacagaggctcaggtgtcagggagggttcccaggtcatctccaagagctttcagacacttcctcctgccagtggccccagctcagaaaaccagaaagtgtgtttttttttagccccgttttcctgggatgctgaagagttcaattttcccctatctcccccactctcaaaatccttttatcaatttattgaataaatttgagcaaagcgatcacttcaagggatatgaaatcctcatttgaccaaaacagaagactctctggatggctgggcactgtgacttatgcctgtaatcccagcattttgggaggccgaggcgggcagatcacttgaactcaggagttcgagacagactggctgacatggtcaaactccatctctactaaaaatacaaaaattagctgggtgtggtggtgcacacttataatcccagctactcgggaggctgaggcaggaggagcacttcaactggagaggtggaggctgtggtgtgctgagatcgtgccactgcacccctgcctgggtgatattgagactgtttccaaaaaacaaacaaacaaacaaaaaaccaagactctatgggacacaagttacatctcagacacgtgaagagcaactttaaagaaacctcaacccagcaaacttaggatcagagtctggggtttagaaacccaaaccatgttaagaatctccctttccaccagtctccatttttctacgctgccctagagccaaaactcatgggatgcccacagggggcctgtccccaccaactgacagcaccagcttcctcccttcaagctgtcccagaatcagacggttccatgggcaataagaccaaatgcacgctagaacccacccaactccaagggtgagagagacgacagagggccagaacacaggcgttcacttaacgggacctcccaccttgggaggagccagtctctagccccggaggcattgggacagcccaggagccggtcggcggcaaagtcctcccattctaccgacccccacccctccaggccatggggaggctgcaaatggagctggagaggtcagtcctagcagcatgtgacacttccttgtcattacgcctcaatacacgggggtgggagaccctcccttctttcccccaaagagacagaccacgctttcaagccaccaaagcatccaagagccagtccccatgctcgtcttccccatttcgcccaagtgctcagccctagacaggtccccatccactttcccgactgaagaggaaggactgtccctcccacccccacaatgtccctttctcctagagaggggacagaaatgggactgggttgggggcaaacactgccctttgccctgatatggaggggagagtaaaggccctccgcccgggaaggtggacccctgcctccaggcatgtcctaaggccggggggctaaggggggggtcccaaaagtgcgtctccgagctccggggcgcctgcacacccaggcgccgctcctggtgacccccagtgcgcccctactccctgcaggggggtcacccgttgggatcccactcgaggcgcagcgggagggccaggcccccgcctaccgcccacgtgaccccgcgacggccccggcccccctccgcgaccctgcgcgcgcgcgcgcacgtgacccccgccccctcccccgcctgcgcgcgcgcgcgagcgcgcccctcaggccctcggcctcctcacctggcgggcccgctgcacggcgtcggcgaaagcgtccttgcggattcccgggccgcctccgccgggtggctgagaggggcccccggccgaccccccgcccgggccgccgccgccgggaccgccgccgccccggtcccccgcgcctggcgggcccggcggagggcctcccccggcgcctccggctcccccgcccccgccggcgggcggcggcggcccgggcgggggtcctcccgtgctgtagtccgacatggcgcggcggggccgggcctggcgcggaggctgaagctgaggaggcggcggcggcggcggcggctcaacgcgggaacaaggcctcgctccacacggccgcggagcactctgggaacccagccgctgggaggacgacgaggggggagagagtcgcccctcccgccgccgacgtgacggacgactccggcgggccaatgggaggcagccgccgcaccccggacaccaatcgcgagctctgtaggaggtggccaatcggagtgcaatgaggggcagtgggcgggaggctcagagtgactgacagctctcagaggcaatagctgcgagctgcccgtgctgggcgggcaaatgaaggagatctgagaaggcaggaggcccaatgaaacgcgagtgccagattcgcggggcggcttcagaattagattgacggttctgaagagtcacgtggactgtaaggccgggcctagtggaagactcctatggaccggctgggtgggcgttaggtttgatagtcgtggacacaagccaatgaatgcacgtgagaggtggtgcttgtaaagatgggcagccaattaatccaattcctgacgagttctgggtgatgaggttggctttggactttaattgcttcccttgttaaccagaatccttttctatccctgacttctaagccaatggctgagcgacatgggtgggtgttcggtgactgacactggtctggacaaatgggaatgaaggaaatcaaagcgcccacttttggtgggagccagtggaagcgccgctgcattggggcggagtcggccaccagacagcgaggggattagcgggaactgtagtgaatggcagccgacgtgggcggtggcaatcggctgcccgaactcaggcctgatgtctgggttagctcaccggcagcctggttgggtaggcccggcacgtggcccgcttgaagccttagagatcgagcgcttccggaggtggggaggccggaaagcaggaaactcgggatcccccgggccttcttctctctcgaccccccatctagagcgtccagttctcttgcaggactcaaggaaccagccccactcacgagtccagaaccgttccaacaaccgggatcgagggatcacagcctcgatcacacccctcacttcacacccctcactcccttcgcctaaggccctgggatccaagcctcaagctcctatcctaggtcctcacttcctctcctggacacaaattcccattcaggacccagaggcccaaggtccccagctcccctactgggtccagggatctcatgcacccagttccactcctaggcccaagtatccagacacgttcagcaaaaaccatctctttattccttgttgtgtgacatgttcaccatttcgccctggagccaggacgacccacaaggggccagactggagtccacgtttcttgtctcaggctgcaccctggggagggagtcccaggagttttctgacccagcactgcccccctccacccaccaccaaccccagcttcaggaatcttctgacccagagccccacccccacccccagcctgcttttgccaccaaaaactgccccagggcctgaaccttgaggcctcgagggctctttggggccaggggtcatcaggtcctcctgtcccatttctgcctaggctgtgtcgtccagctcacagcctatatgcccagggttttcttcatggcttcgtacaccacatagctgatgccacctgctggtaagaccttcagtagcgtgggggtcatgcctcggtacagccctagccagccctgctgggccaggatccgctggaggactccgcgcatggtgggatttgagccctccacggtatctgcagggacacaggcaagatcaggactaggccagagatgaccgggcctcctaggagtctggaatgttgcggacaggtgctgaagccacgggtaggggccccaggggtcagtaggaaaacagtttgaagagtcttagaggaaattggtcagtttgaggaggagtgggggagtttctgagtagtagttatcaggattaattttaggaaattttcttgaggggtgggagtggggatagggtctctctctgttgcgcaggctggagtgtggaggcacgatcatagctcactgcagcctcgacctccagaactcaagggatcctccagcctcagcctcccaagtagctgggaccacaggtccatactaccatgcctggctaatttttatatatatatttttgagacgcagtctcaaaagttatcaaaagtgggctgggatcagacacggagggtgccggactcagttttggggtatgagaaaattgagacagccagggtggggcggggaaggggcatgcgtggtggccgctggggacaggctgaccttgggcctgcatcctggtgcgcaccagagtcagtgggtagctggccatctggccacaggtcgtggatagcgtcacagacgacagactgaccaggccactggggtcccccatatccctgcctgacttcacccagaagcactggagcatctgcaagagaagggggccaggagaaagctcactaggagcctgggctccggccagccctgccaccccctctgcaggacccatacctcatagacagccaggtcggtgcaggcataggggatgatgccgagcatattgggcaggtagccgcggtaaagggcgcgggtgccctctcgctgcaagatctgcctggcgcagtccagcagccccttgtactggcccgtccgacgcaaggtcaaccgcgtcttcagcacctgaggatggcggggaacaaggcagctcatttgattgaatcctgtcaatgaccctcggggtagccattgtccccaccctacaaacaaggaaaatgaggctcaggaaggcaaagagctgggtttcagacccggatctgtcagattccatggaatgctctctgaattttgagttctgaagcacaaatgctggcaaaggccaagagagtgagggaagaaggctcacgtctgtcttcccagccctttgggaggctgaggcgggaggatcgcttgaggccgggagttcgagaccagcctgggcaacatagcgagaccccatctttacaaaaaaatcaataaaataaaaataagatgtatatggaaacatcaacatgggagaacagcctggaaaactgattaagaataacagggaagggaggcgagaaaacatgccctcaagcctcaaaaattgaagacagctggcaaaactttatggcaaaaagatcaagcactggggggaaagaaagagagtgaataggtagaaaacagggccttcctagggcagtgaaactactccgtaagatactacaatggtggatacaagtcattatacattcctcaaaacccatagaactgttagattaagagtgaaccctaggtcgggtgcggtagctcatgcctgtaatcccagcactttgggaggccaaggtgggtggaacacttgaggtcaggagtttgagaccatcctgggcaacatggcgaaaccctgtctctactaaaaatacaaaaattagctgggtgtggtggcaggcagctgtaatcccagcaggagaatcgcttgaacccagaaggtggaggtcgcagtgagcagtgagtcaagatcgtgccactgcactccagcctgggtgacagagtgagactctcaaaaaaaaaaaaaagaaaaagaaagaaaaaaaggagggtttccggtccacagatgagaaatgaaaatatatatgtatacatatatatagtatatatacatattatatatgtattattatacattatgcatatattatatataacatgcatagacatatttttatattacatagtatataataaatgtaattatataattagatacattaaattatttagttatatataatatatacatgttatatgtactatatatttacataataagtaaggtatataatatatgtgtatattatatataaaacatatatatatatatattttttttgagacagggtctccctctatcacccaggctggagtgcagttgtgtcccatcatagctcactgcagcttcgaccttctgggctcaagtgctcctcccacctcagcctcctgagtagctgggactacaggcatgcgccaccacacctggctgatttttgttttcagtaaagatggggtcttgctatattgcccaggctggtctcaaactcctgggctcaagcaagcagtcctcccagctcagtctcccaaagtgttgggattacaggcatgagccaaggtgtctggcctgaaaatttatatatatatatataatatatatattatatatatgttatatatatatataatatatatattatatatatgttacatatatatataatatatatattatatatatgttatatatatatataatatatatattatatatataatatatatataatatatatatgttatatatataatatatatgttgtatataatatatacatatataaatttatgaaaatgttatatatatgtatatgtgttatatataatatattcatatataaatttatagaaaggaggaggagattggagaggaggagaaagaggtaaagggggaagagggagaggagggagaaaggaggagggagaaaggaaaggaagaggggaggagaagggagaaaggaagaggggaggagaagggagaaaggaggagggaaggaggaggaagaaaggaggggaggaggagaggaaagaggaggggaggaggagggagaaaggaggaggaggagaggaggaaggagaaaggaggaggaaagaggaggagggagaaaggaggaggggagacagaggaggaagaggtgaacggggaggagggagaagtgtgagaaaaaaggaggagaaaggaggaggggagaaaggaggaagaggaagtagccccagcaacgtgggtaactagtttccacggcgtttcctcacctgcggggcacatgctctcttacctccatggggttgatgagggtctgggagatggccacagccagggagccagcaaggagacgctcctggaagggcggggacccttgtattccacagaagtaattcttgcactgggagaggagagaggagggtgagagagaagtcagccaccctccgacacaaaacccgcgcagggaagaggcctggggtctggagggtgagtgtgtgcttgaacaagggcctggagttttgggggcatgggaggggtttgggcttgagctgggggaagcaggcccctcattccccacctgctcgaatacggagaacttgatggcatactcaggagcaatcttgagcacgttgatgccgttgccccgccacagggagcggaagccgccctcctggaccatgctctgtagcccccccagcaggttggtgaagttcgtcttggaggagtagacctgggtggagggaggaccctggaggagcccctgctcgcctctgtctccgtccccatccctgccccaagcgcagccccaccgggacctcccaagccacccaaccccaacccatccccatcccatccccattccttcttcagctccttccccggccagttctagaatcgcatgcaaccctgacccaaagccaacatcaacctacattcccacctcacccctcctcttcatctcctcagtctttttctctctctctttcttccttccatcctttcctttctttctccctttttgttccctccctccctcccttcctccgttcctcccttccttctttttttttttttttgacggagtctcactctgtcgcccaggctggagtgcggtcgggggatctcggctcactgcaacctccgcctcccaggttcaggcgattctcctgcctcagcctcccgagtagctgggattacaggctagtgtcaccacgcctggcttatttttgtatttttagtagagctgggggtttgccatgttggccaggctggtctggaactcctgacctcaggtgatctgcccaccttggccccccaaattgctgggattacaggcatcagccaccgcgcctggccttcttttccttttctttcttgtttttttgtttgtttatgttttcgagacaggatcttgttctgttgcccaggccggaatgcagtggtgcaatcacagctcactgcagccccaaactcctgggctcaagtgatcctcccacctcagccttccaagtagctgggactacaggtgcgtgctaccatggcaggctaattttgtaaaattttttgtatagatggggtcttactatgttgcccaggctggtctcaaactcttgggctcaagcgatcttcccactttggcctcccaaagtgctgggattacaggtgtgagtcaccatgcccgactcctttttaaatttttaattaattaattaattaattattattttgtagagatgtggtctgactatattgcccagctggtctcaaactcctaagctcaagtaatcctccctccttggcctcccaaagtgagccactgcacccgtttattttttcagccagggatctcgctctgtcacccaggctggagtttgtggcatgatcatggctcactgcagcctccaactcctgggctcaagcaatcctcctgcctcagcctcctgagcagctgagactatgggtgtgagatatcctgcttgaggtagctccagttctatgttgccttttttttttttctttcttttttgagacagagtctcactctgttgcccaggctggagtgcagtgatgcaatctcggctcactgcaacctccatctcctgggttcaagcaattctcctgcctcagcctcctatgtagctgggactacaggcacgcaccaccatgcccgactaatttttttgtatttttagtagagacagggtttcgccatgttggccaggctggtctcaaactcctgaccccagatgatctacctcccctgggcctcccaaagtgctggcattagaggcatgagccactgcacctggcccctaccttgtctttaaactcgtccaaagaccccatccccaattccctgacctccaacccccaccttggcccagcgttggtccctgtccctggcaagttctctcaactcctcaaactcgactccaagccatgtccacaccagctctatcaccatccacaacctcaatctcagctagtccaggagagcccaactccagccagcactcctatcctgaactccatccacgtcaactccatctgtcctcaccccacgttctccccagtggctccagcgctgggtcccgtcctccccccaacccacacaaacctgcatgtacaccttggctctgtccagaggtgccgtgcccgtgcgagacaccgccccggccatagctcctgagagtagaaacttccacaaggcctccttgttatccacttccaggacttccacggggaccatcagctgctctcctgtgtccagtacctgcagggcagacccggccctccctcatcctcagccaggttggggcaccttccccagacacacatctagggcacccacctggtgaaagacccaccctgttcccccaagtctgcatttttttttttcgagacggagtcttgctctgctgcccaggttagagtgcagtggcacaatctcagctcgttgcaacctccacctcccaggttcaagcagttcctgccgcagcctcctgagtagctgggattataggcatgcaccacaacacctaatttttttttttttttttttttttttttttagtagagatgggtttcactatgttggccaggctggtctctaactcctgacctcaagtgattcaaccctcccccctggtttttttttgttttgtttttgtttttttttagacagagtctcactctatcgcccaagctggagtacagtggtgcgatcttggctcactgcaaccgctgtccccctggttcaagcgattctcgtgtctcagcttcccaagtagggacaatggtgtgatctcggctcactgcaacctccgcctcctgggttcaagtgattctcttgcctcagcctccccagtagctgggattacagtgccaacgtgccgagcaaatttttgtattattttaatagaggcagggtttcaccatgttggccaggctggtcttgaactcctgacctcaggtgatccacctgcctcagcctcccaaagtgctgggattacaggtgtgagccaccacacccagccaatgtaatatagactctctaagttactcatggaggatccaaggaggaatacaaatgtaattaggactatatctagactcttaatttattcttattttttgagacagaatctcgctgtgttgctctggcttgagtgcagtgatgagatctgggctcactgcaacctctacctcctgagttcaagcgattctcctgcctcagcctcctgagtagctggtactacaggcgccaaccaccatgcctggctaagttttgtaattttagtagagatagggtttcggcatgttggccaggttggtcttgaactcctgtcctcaagtgacccatccacctcaacctcccaaagtgctgggattacatgtgtggagccatcgcgccctgcctccctgccccaccctgcttcaaggtggaattctaggtccgctagcaggggagtgggcctgtagagggcgtgggtagcctggcctctccctgtagtcctgaccagaggtgccgggacactggtgtttcctaaactcacctgctgtgacgggagatgttcaaggttgttgtcatgcatgtggccaaacgcgtacccatacacgtgtgtacagccagggttccaggatgggggtggaggcggaggttgggggggaggcggggctttgatgagtaaggtcttgaccctcctaaacagtgtctggatcctagagcaagtgttctgaggttccccaggctgagcgcccatggaggaagttaggacacctggcttcaaatccctaagcagttgtttgctgctccagctaccatgcgggagtgtctagtgggaggattgtgtgggggaccaagaggaggatgaagtcacaaacgcccctgtgaccttcctaggtgtggtgggcagcgtgatggcccccttcccccaagtatccacctcctgatcccccaaaccaataaatatgttatcgttataaattgaattgtgtcctgtcaaaattattattattatcgttttttttgagacggagtctcgctcagtctcccaggctggagtgcagtggcgctatcttggctcactgcaagctccgcctctggggttcacaccattctcctgcctcagcctcccgagtagctgggactacaggcatccgccac[184 bp omitted]ggaatttggagacagggcctttgggaggtcctcagggttagatgaactcatgaggatggcccctgcaagatggaattagttccctataaggaaaagacaaaccagagctctttctctctctctgtctgccatgggaggacgcagcaagaaggcatggcaggaagaaatccctcagcaggaactgagctagccagccaccttaaccttggatttcccagcctccagaaataaatgtctgcagtttaagaccccgctctttagtgtttccttatagcagcctgggctgacttacatttgttacatggcaaagggg[134 bp omitted]tgaaacccagtctctcctaaaaatacaaaaattagccaggtttggtggtgtgcccctgtaatctcagctactctggaggctgagacaggagaattgcttgaacccaggagacagaggttgcagtgggccgagattgagccattgcactgcagcctgggcaacagagcgagactccatctcaaacaaacaacaacaacaacaaaactttgctaggctgggcgccgtggctcattcctataatagcagcactttgggaggtcaaggcaggtggatcacttgagcccaggagttcaagaccaccctgggcaacatggccagacccctgtctctataaaaaatacaaaaattagctgggcatggtggtccatgcctgtggtcccagctacacaggaggctgaggtgggagggttgcttgagcttgggaggtggaggctgcagtgagctgagatcttgccactgaactccagcctgggtgacagagcgagaccctgtctcaaaaaaaaaaaaaagaaaaaaaaaaaaagaattaaggttgctaaacagctgatgggaaatggtctcactctgtcacccaggctggagtatagtggcacacttaaggtcaatccccttgacctctctgttcaggtggttctcccacttcagccacccgagtggctaggaacacaggtgcggacaccacgcccggctaagttttaaaaattatttttggctgggcgtggtggctcacacctgtaattctagcactttgggaggccaaggcaggtggatcacctgaggtcaggagtttgagaccagcctggccaacatgataaaaccccgtgtctactaaaaataacgaaaattagctgggtgtggtggtgcatacctgtaatcccagctactcaggaggctgaggcgggaggatcacttgagtccaggagttcaagaccagcctgggcagcaaagcaagaaatttttctacaaaaattttttaaaattagccaggtgtggtcatgtgcacctgtagtcccagctacttgggaggctgaagggggaggctcccttgagcacaggaattagaggctgcagtgagctatgattgtgccactgcactccagcctgggtgacagagtaagacccagtctctaaaaaacaaaaaaagtagtcaggcatggtggtgtgtgcctgtggtcccagctactccggaggctgagatgggagcatcacctgagcctgggagtttgaagctgcagtgagccatgattgcacccctgcattccagcctggggaggggacagagtgaaaccctgtttcaaaaaccaaaaccgaaaccaaacaaacaaacaaacaaaaaacctgacaaaatcatatacatgtaggtatatatgtattagccagctgttgccatgtgacgaattacccccccgccaaaggttggcagcttaacacaacaaacatttatcatctcacccatattctgagcattaggaactcaggagccgctgagccggctgttcccgtgatcagtgtttgaagtataagagtctaagattcaggattcaggtactgggatccagttgtttcggtggagggatccacaaagcttggactatccagggaattcaactgatagaattgcagtgagatgttggccaggacagcaagatcctcttccaagctcagttacatggctattggctgagttccttaccacatggtcctctccataaggctgctcatggcatgaccaccggcttcctccagagcaaatgttatgagaaagggggagagagagagagagagcatgtaaccaataaccaggatggcagcgacagtgtctttttttttttttctttgagacatagttttgctcttgttgcccaggctggagtgcagtggcacaatctcgactcactgcaacctctgccacccaggttcaagcaattctcctgcctcagcctcctgagtagctgggattataggtgcccgccaccacgtccggctaatttttgtacttctagtagagacggggttgccatgttggccaggctggtctcgaactcctgacctcaggtgattcacccgcctcggcctcccaaaatgctaggattatagacgtgagccactgcacccaatcttttatttttttattttttgagatggagtcttgctctgttacccaggctggagtgcaatggaccaatcttggctcactgcaacctccacctcctgggttcaagtgattgtcctgcctc[134 bp omitted]tgagctcaagtcatcctcccatctcagcctcctgagcagctggaactacaggtatatgccatcatgcccagctaattgaaaaattttttgtagaaatggggtctcactgtgttgcccaggctggtctcaaactcctggcctcaagcgatcctcccaccccgacctcccaaagtgctgggtttacagatatgagctaccccacccaccctgaattttctattttttccacaataaatttgaattactcattgtgggttgaactttgtcccccaaaaagatgtgttcaagccctaaccccagtaacctgcaaatgtgaccttatttggaaatacggtctttgtagatataatcaaattaaaatgaggttacactggattggggggggttgccctaatccgatgactgctgtccttacaagacatggaatcggccaggcgcagtggctcacgcctgtaatcccaacactttgggaggc[135 bp omitted]gaggcaggagaatggcatgaacccaggaggcggagcttgcagtgagccaagatcgcgccagtgcactccagcctaggcgacagagcaagactccatctcagaaaaaaaaaaaggccgggcgcggtggctcatgcctataatcccagcactttgggaggcatcctggctaacatggtgaaaccccatctctactaaaaatacaaaaaaaaaaaaaaattagctggctgtggtggcgggtgcctgtagtcccagctacttgggaggctgaggcaagagaatggcatgaacccgggaggcggagcttgcagtgagccga[131 bp omitted]aatgcaaaaattagccagttgtggtggtgtgcacctgtaatcccagctattctggaggctgaggcaggaggatcacttgaacccgggaagcggaggttgcagtgagctgagatcacgtcattgcactccagcctgggaaacagagcgaaactgcatctgaaaaaaaggatggaaatttgggcagagagacacagacacacataagggagcatacagtatgaagataggcaggcagtggagtgatgagtctatcataaaccaaggaacaccaaggaccatgtggctcacacctgtaatcccagcacgttgggaggctgaaggctggcgaattccttgaccccacgagttcgagatgagcctgggcaacatgatgaaatcctatttccacaaaaaagaagtaataataattaggccaggcacggtggctcacacctgtaatcccagcactttgggaggctgaggtaggcaaatcacctgaggtcaggagttcgagaccagcctggccaacacgggaatacctggtctctactaaaaatacaaaaattagccgggtgtggtggtgcgcacctgtaataccagctactctggaggctgaggcaggagaatcgcttgaacctggaaggcagaggttgcagtgatctgaaatcgagccactgtactccagcctgggaaacaagagcaagactcctatatcaaaaaaaacaaaaacaaaaaaccaaccaaccaaacaagaaattagccaggcatggtggcatatgcctgtggttctagctgctcgggaggctgaggtgggagaattgcttgaacctgggaggcagaggtggcagtgagccgagatcgtgtcactgcactacagcctgggcgacagagcgagactgcatcacaaacaaacaagcaagcacagaaacaaacaaaaagttgggcatggtggtggttgcctatagtcctagctacttgggaggctgaggtgggaggatcacttgagcccaggaggtgtaagctgcagtgagccgagatcgcaccactgcactccagcctgggtgacagagcgagaccctgtctcaaaaataaattagctggacataacggtgcgtgtgcctgcggtccctgtggtcccagatactcaggaggctgtggtgggaggatcgcttgagcacaggaattcgaggctgcagtcaggtacgattgtaccactaccctctaacctgggctgcagagtgagatcctatctctctctctctctcacacacacacacacacacacacacacacacacacagacacacaaattgttttaagccattctgtttgtgataatttggtctggcagccctaggaaaaggataatttgaaaaaaaattgaaatttgtaatttgaaaaaaaatacagaggccgggcgtggtggctcacgcctgtaatcccagcattttgggaggctgaggcaggtggatcacttgaggtcaggagttcgagaccagcctggccaacatggtaaaaccctgtctctcctaaaaatacaaaaaattagccgggcgtggtggtgggtgcctgtaatcccagctactcaggaggctgaggtaggagaatcgcttgaacccgggaggcagaggttgcagtgagctgagaccgtgccactgccctccagcctgggcaacagagtgagactccatctcaaaaataaataaataaataaaaataataaagcccagaaaatttagaaggggttataaacagggactccctcccctgctcccattttatagatgtgtaaactgaggctcaaagagggaatcatttcctggctcttggaactgtgggtgttgggaagcagccccttgtcccttccctaggggtagactaaggtggtcccatagccacccacccccttttcagtaaaaaccacaataaaagagcttagaaaatttattccttttgttcttttcctttgaaataacacacacaggcagggaggtggggcgcagtggaggtcgaaggaggtggaagcgtgcggaagtcctccagcccctccccaaatcccagttcccctttccaagtccctccatggggtctccagatgatcctaagctcagaatccaactatgaagtgcagaatgtaagggcgcaggggaggaggactttgctcctctctctggtagaaaaatagatctggaatgaatttggggatttggtggtttttttttgtttttgttttttgcatcattgggtgcttgggtttagggaagggtggtctttgccgattttctcctggctttcaactctggaagcctggggaggccctgatagtgctggggtggggacatcccttcatgtgtccctggcctcagactgtctccttgccagcctccaggagtgagtgattcctcggaccccttggaggaacacagctctggggactattcgcctagaaggtgggagggggatggaagatgctgtgaagtgtggggatgcagggagtggagtggttccagggaacagtttccccacagggctgggagggggtggccatgcagaggtggggtgagggggaatccagcatccgtgcaggttgcagccaggacctgggcttccttccccacagactccctcgaccatgcaatttcatgtcatgagaagccggctctgggcaccagtgtgtgtgggatactctgtgactgggctgccaggatctagacttggggcctgaacatttgggacccggcgcctggaagattcagatcagaaaccggggattcagggcttgggattcagtgccttggaatatcaggatctgccttcaagagatgaggtttcaacattgagggactgggcagagggattggggacccagaatctggaatccagcagctgcagttgccaggatccacttgctgtgccactggggcccccgcacttgttttaggagccagaatctggtgggtgaaggcttgggaatctgggatccagtgcctgggggtggaaggcgtagtgcttgaaatgcagggatctggcagtcagcagaaggatctgagacccagtgtcgaggttaaaaaaaaacaaaaaaccaaaaaccaatgcaggaatccagtgggtggagtgaggggatctgggatccagtgatgggggccccaggatccaggcattgtggttgtcaggatccagtggtgaggtttgttgacatccagaatccagcagctgagcttggagatccagggctcgaggcatggggatctggggttggggatctaggatccagcgtttcactaggacactggatctggtgcctgagggaggcagggtctgggtgttgaggtacagggaatccgtgctcctgtggttggggtgttgggatccattcactgatttgtgtgggatccagtggttaagacgtagaggtccaggatccagtagggggcacagggaagcgtgggatccaccttaggatgtggggctgcaggatccagtgatttgggggatggggattaagggctggggtgtggataatcttgaatcttgtggttagggtagcagacttgagttgctgaagtaagggatccacagttatggttacagggggatctgggatctagtggctgaagggtggggatcgcatgacccagtggttggggcataggagtctaggatccaggatctggatgctgggatcccatgacccaatggttggggcataggagtctaggatccaggatctgggtactgggatctcgtggccaaagagtagggatcctgtggttggatcatcagtctccagtggctgaggtgtggggggtgagggattggggggacgggctccgggtccctcacctggacgtgacccccaaggcctgcttcatgttctcgtagaccacataggagatgctcacagctggaataaccttcatgaagttgggggcgatcccccggtagaggccccgcatgccctcctgggacaggatgtgacgtagcagacccagcatggacagctgggggccaccctcgatggaggctgggagggggcggggggggcaccaggtaaggccaacgttcccctttcacttccccctcctacccccagggttgggccaggtggtgtcattgcagcaggagggaaggaggttagactaacagtgggacctaccactcagagtcgagacttgtattgaccttggaactggctgctcaccttttcgccccaagtttggggacaattagaaatggagcaggtatgggtgtgcaaggtgagaaaggacagaaatgtcctcctcctggagccaggttccctccctcctttcccagctgactcctactcatattcccaacccctatcccagagccagctccccaggggactcctccttggtgctccagtctaagtcaggctcctccctgccctccacccactttttgttttttagacggagtttcgctcttgttgcccaggctggagtgcaatggtgcaatctcggctcactgcaacctccgcctcccgggttcaagcaattctcctgcctcagcctgccaagtagccgggattacaggcatgcgccaccttgcccggctaatttttttgtatttatagtagagacggggtt[221 bp omitted]tcactcctgttgcccaggctggagtgcgatggcacgaacttggcttactgcaacctatgcctgctgggttcaagtgattctcctgcctcagcctctcgagtagctaagattacaggcgcctgctatcacacccggctaatttttgtattttcagtagagacaggatttagccatgttggtcaggctagtctcgaactcctgacctcaggtgatccacccacctaggcctcccaaggtgctgggatggcaggcgtgagccactacccctggctcccacccacttttttgagacagggtctcactctgtcacccaggctggagtgtggtggcataatcatagctcactgcagcctcaagtgatcctccggcctcagcctcccaagtagtttggactacaggcacctgccaccacgcctggctaatttatttcttcattttttaaaaaaagatggggtcttgctatgttgcccgggctggtctcaaactcctggactcaaatgatccttcctctttggcctcctaaagtgctgggattacagatgtgagccactgtgcccggcctccttctcccctttatacaaccctaaatcaatacttaattccagaatgatttatttagcatcttccttcctctccggcctgtgagctctatgagggtggggaccgtgtccgtcttgtacactgacacatctccagtgaaaatcacaaaacacaaacactaaaattctcaagaaaattctcaaaacagattcagggagaatgggagggtagtggtggaggggacggggggaaataattcataaaagaaaaatacagacaaaaacaataaccactctggccctgactgctccctacccctgttcctagcctcccgctcacgataacccaggcttacaaattaagagttcaagttaccagcctggaaatgctagacatttgccagcaacgacatcccagctaagtctgcaagggatctcttcctgtacccactgcacctgttatcctagttaatcctcagctccatgaaagtaaaggactcccatttcaatgtcacaaatggggaaacggaggcccagagaagcccatcgaaatccaggagggtcccagcccagggctctacttgggagaagctggggcccaagcgatgagactccccctgccccatcctcccgcccaggcctcaccttgtgcctgcatgcgggtccggaccagggccagcgggtaactggctatctggccgcaggtgctggatatggtaccgcaggccaggagcacgaggatgcctgggtctgccgagtcgtggctgtactgctgaagccaccagttcttcagagtctggagtggagaagggagtagggagggttggggtgggtgaccctaggaccctggcttcaaaggcctgctggccggttctgtatcccatgacaggtgctactagctgagcacttggtacctcctaggggccgggccagccctttccctgcgtcccctcacccagtcctcatctggaccctctctggtaggtggaataagggtcccctgtactgactatgccctaatctctggaacctctgcatatgttacccaagatgacacaaaggactttgcagatgggattcagttaaggatcttgagatgagattattttggattatctgagtggcccaatgccatcacaagggtccttctttttttaaaaattattattattattattttgagatgaagtcttgctctgttgcccaggctggagtgcagtggtgtgatcttggctcactgcaatctccacctccctggttcaagcgattctcttgcctcagcctcccgggtagctgggaatacaggtgcgtgccaccacacctggctaattttttgtatttttagtagagacagggtttcaccgtgctggccaggatggtctcaatctcctgaccttgtgatccgcctgcctcagcctctcaaagtgctgggattacaggaatgagccacagtacctggcctaattatttttctttttacagagatggagtgtca[132 bp omitted]gagtttcgttctcgttgcccaggcaggagtgcaatggtgcaatctcggctgactgcaacctccgcctcctggcttcaagcgattctcctgcctcagcctcgaagtagctaggattacaagcgtgtgccatcacgcccagctaatttttgtattattagtagagatggggtttcaccatgttggccagagtggtctcaaactcctgacttcaggtgatccacctgcctcggtctcccaaagtgctgggattacaagcatgagtcaccatgcccggcacaagggcccttctaagagttagaaaagtaggtgtaaagacagaagcagaagcgagagagagattggaagatgctatgctactggctttgaagatggaagaagggaccacaagccaaggagtgcaggcggcctctagaagctttttcaaggcaacgaaacagatttcctcctggagcatccagaaggaacgcagccctgccaacatctcgattttataaagcccagtaagaaccccattttggatttctgacctccagaactgtaaggatatacattcgtgttgttctaagacactaagtttataacttgtttgcttgcaagaaggg[138 bp omitted]aagactctgtctctacaaaaacaaacaaacacacaaacaaacaaacaaacaaaaaaaaactggatgtgatggtgcatgcctgtggtcccagctactcaagaggctgaagtgggaggattgcttgaacccaggaattcaaggctgtagtgagccgtgatgcactccagcctgggcgacaagagtgagactcagtatcaaaaagaaaaaaggtcgggcctggcgtcctcacactggtaatcccagtgctttgggaggctgagatgggtggatcacttgaggtcaggagttcgagaccagcctggccaatatggcgaaactccatctctactaaaaataccaaaattagccggtgtggtggcaggcacctgtaatcccagctactcaggaagctgaggcaggagaatcgcctgaaccggggaggcggaggttgcagcgaggcaagatcacaccactgcactccagcctgggcaataagagcaagactgtctcaaaaacaaacaaatgaacaaaaaaacactctccaacgacactgcctgtggtagatgctgtgagtacaccaccttcatcccttcccactccaattcagacctgctgacttcttactgccaacatttacccaaagactttgcttgtggactttctctgaacgcaggccagccggctctgaccacttaggaatgggcagaaagccctgggaaattagcatctccagatgcaaccttcaaaagactgacctggtggatcaataccccagctccctcatctctctggtgcagcatgtcttatgctgcctcccacagatctctagagggctggaactccatttgctaggaatagtaacttgcttgataacatactgttacgggttgaatcatgtccctcctttgggggggaacatgttgatgtcctaacccccagtatcttagaaggtgacattctttggaaatagggtctttgcagatctaattagttaagatgagtagggtaacagggtagacccttagtccagtatgactggtgtccgtagaggagaaagacagagacacacacggagaaagacagccaggtgacagcggaggcagagatttgagtgaatgtatctacaagccaaagaatgtccagggttgctgggaacaagcagaaactgaaagaaggaaggaaggaaggattctcccctaacaagtttgagagggagtatggctctgctgacaccttgattttgcacttctggcctctggaactgtgagacaataactttctgttgttttaagccaaccagtttgtgatactttgttacagcagtcctaggaaactaacatactcatactgtgtgcattgactccctgtctcattacctccccaataaatcacttgtcctcacgtcccagtttcagggtctgttttggaaggatctcaaactaagaccaaaactattattattattattgagacagggtctcgctctcacacccaggctggagtgcagtggtgaaatctcggctcactgcaacctccgcctcctgggctcaggtgatcctccctacttcaacctctggagtagccaggattacagctgtgcaccaccacacccggctaattatctttatttttattttattattattttttgagacacagtctcaccctgtcgcctgggttggagtgcaatggcaccatctcggctcactgcaaccccacctcccaggttcaagtgattctcctgcatcagcctcctgtgtagctgggattacaggcttatgccaccgggattacaggcatgtgccaccaggcttggctaattttttgctttttttttgagacggagtctcgttctgtcgcccaggctggagtgcagcggcacaatctcagctcactgcaacctccacctcccgggttcaagaaattctcctgtcttagcctcccaggtagctgggattgcaggcacacacaatcacacccggctgatttttgtatttttagtaaagacagggtttaaccatgttggccaggctggtctccaactcctgacctcaagtgatctgcctgcctctccctcccaaagtgctgggattacaggagtgagccaccatgcccggccctattatctctattttatagaaaagaaactgaggctcgggaagttacttgcccaaagctacaaaataaaggtgagaaccaacattcacagctgtatgtgaatctagaactgtgcacctgaagactttagggtggctaatcccttctgaagccttctgccaaggtgactgtaagaacaagaccttctttgctttgcggctgggagaggcttataggtttcatttcctatgccaattctaatccaccagaaattgctgcctgaaactggaattgtgttgagcaggactcagtgctgtgatggattagtaatgcctagcccaggcacagactgggtaaaataggcaagtacttaacattattgcctttgaaattttagaagccttcttttgggtctagaacagcacttgccaaatagatgtttaatgggttattattaagatcaatctgttgaaaagaagttctaaagacggccgggtgtggtggctcatgcctgtaatcccagcatttttttttttttttgagatgaaatctcgctctctcacccagggtggagggcagtggcgcgatcttggctcacagcaaactccgcctcctgggttcaagcgattctcctgtctcagcctcccgagtagctgggattacaggtgcccaccaccacgcccagctattttttgtatttttagtagaaatggggtttcaccatgttggccaggatggtcttgatctcttgatcttgtgatccacccccctcagcctcccaaagtgctgggattacaggtgtgagccactgcacctggcaattccagcattttgggaggccgag[132 bp omitted]gaggcaggagaattgcttgaatctgggaggcagaggttggagtgagctgagatcacaccactgcactccagcctgggtgacagagtgagactctgtctcaaaaaaaaagaaaaaaaaaagttctaaagactagattaatgtggccagcactgggttaaaaacaaaaaaagttaaatcactttactgagagacttctcggagcctttaagggacaaacacagattttgaaactccaaggtttctaaaacctcttagacttttaaagtccctttttgggtaaagaatgcattaaataataagactgtgtcttctttctgtctttctttctttctttttttttttttttgagacaggatcttgctctgttgctgaagctggagtgcattggcatgatcacagctcactgaaacctctgcgtactgggctcaagcaattctcccatctcagcctcctgagtagctggcactacaggtgtgcaccaccacacctggctattttttttttttttgagacagagtcttgctctgtcacccaggctggagtgcagtggcacgatctcagctcactgcaagctccgcttcccaggttcatgccattctcctgcctcagcctcccaagcagctgggattacaggtgcccgccaccatgcctggctaattttttgtatttttagta[264 bp omitted]ttttttttttttttttgagatggagtttcactctgtcacctgtgcagtgcaagaactcggctcactgcaacccccatgccccgccctgggttcaagcgattctcctacctcagactcctgagtagctgggattataggtgcccaccaccacgctcggctaatttttgtatttttagcagagctggggtttcaccatgttggccaggctggtcttgaactcctgacctcaggtgatccaccggcctcggcttcccaacgtgctgggattataggtgtgagccaccgtgaccggcctctactcatacctcttaatggcttcctattttacttagaagaccctgtaccctgccctgatcagtcccccccagacacctaagacttccactcctccaaaaggccgtatttgttcctgcttccagacctgggtactagatttgtgcatgctcccttgtgataatacgcccaacccatggcttcaatgtcaccttcttggaggcgttcctcaacccccctcccgcccactgttactgaagatgacaaatcctgtcttgtgatcttctgagagcttttctaggagctgaaactatcttatttgctggttgattgcctgccttgtttatgggaatgggcattccaggatggcagggaccatgctggtctcattcaacaccacaactgccacaatccgcacagtgtctagcacagagtagatggtcagtaaatagtcactaagcgaatgagtgaacaacaaaatggaggaacaaatgaatgagtgagcaacggtcttgtctcatttggttgtctacatgccaggtgctggggagggcaggtaaagatggcaggaacagagcctattagatcagaatcagctacataatttgcaggatccagtgcacaatgtaaaagggtgggggtcccttgttcaaaaattattggccaggtgtggtggctcacacctgtcatcctagcactttgggaggctgaggtggggggatcccctaaggtcaggagtttgagaccagcctgggcaacatggtgaaaccctgtctactaaacatacaaaaattagccaggcgtggtggcaggcacctgtaatctcagctactcgggaggctgaggcaggagaattccttgaacctgggaggtggaggctgcagtgggccgagatcgcgccactgcattccagcctgggcgacagagtgagactctgtctcgggaaaaaaaaaaaaaaattaagaatttcaggcctggcatggtagttcacacctgtaatccagcactttgggaggccaaggcgggtggatcacttaaggtcaggagtttgagaccagcctggccaacatggtgaaaccctgtctctactaaaaatataaaaattagccgggcatggtgatgcatgcctgtaatcccagctactcgggagactgaggcaggagaattgcttgaacccaggagatgtaggttgcagtgagccgagatcgcgccattgcactccagcctgggcgacaagagcgagactccgtctcaaaaaaataaataaataaataaaaataatttcgagacagcagtagcagagcgttacaccaagcacagggcccttccgagcatggggctctctgcgacttcacaggtcacatgcccatgaagcaggccctgtcttgcatacaaagattttggggggaacgcttggggacatccaggaccatgctaattgggggagacctggtgatcccactagaaggtaaaagcaacagatgaggtccctggaagagaaacagccaagaactgtctgcacctgcctgtgttgataaaggtctcaagatgctggtgattaggtgtggttcttatggtaacagcagatgctcaaatgggcaggccctgaagatgacattggcttagagaccgtggctgggtctgatacttgcttcggggaagttgggtgtctttgagactcatctttgcctgccttttttttttttttttttgagaaggagtctcgctctgttgcccaggctgcagtgcagtagctctgtcaccaggctggagtgcagtagcgggatgttggctcactgcaacctccgcctcccaggctcaagcaattctcatgcctcggccttttggagtagctggtattacaagcacacatcaccatgcctggctaatttttgtaatctttgcctgatcttatgtttgtcagctagagtggtccctgactttcaggtgaccccggaaggctgagctgctaatcaaaagtaagtggagaagtgggagagtccaatacctggaagggttccccaggattcccagggccaaggtgctcctcacctcataactgcctttctctaactatagcaggtcaactgagccagccccaggggaaggggaaggggtgtcctgtgggtaaatcccagaggggagcagggaaagaggaacgcgctgcccacagacctcgtagacggccaggtcgatgcccgcataggggatgatgcccagcacgttggggaggtagccgcggtagaaggcacggggcccctccctctccaggatacgcctggcgcagtccagcagccccttatactggcccgtccggcgcaaggtcagccgcgtcttcagcacctggggagaacctggttatccctggaaaagctgtcccaccaaatcgctacatccaggaatgaagacacctagaaatagctactcctgaaaacagatgccctgagaacaaccgaattttaaaaaccacctactctagaatcttctgctatccccaaatccctatacctagaaatagttacacctaccaaagtgcacacatgtggcaccaccagtaactgtctcctgatatctttcttttattttttggtcatttctgtagagatggggactcgctactttgcccgtgctggtctcgaactcctgggctcaagtgatcctcccctctccatctcccaaaggactggggttacaggcatgagccatcatgcccagacctccagtatcttgttcccttctgctttcatatcagaaactgtaactttcagcaagcacacagccactagaaagaaaaatgacatttcccagatgccctgggtatgtggctatgtcactatgtcctagccaaagaaatagaaggaagagaaagaggtacacataaggttcagaaagcatccttagaggtggggaggtgtttccttttttattgcttcttccttcttggctggagtgtggaatgtgatgaacggagcacaagcagccacattggtccatgaggttgtgtaacaacaagatagacagaaagaacctgcatcgctaacactctgaagctaccatcccagcctgaaatgctcatctgtagactttgttgatgtgattgaagtttttttttttttttttttgagctggagtcttgctcagttgcccagactgagtgcagtgacatgatcttggctcactgcaaccaccgcctcccaggttcaagccattctcctgcctcagcttcctaagtgtctgggattacaggtgcccaccaccatccccagctaatttttgtatttttagtagagacggtatttc[134 bp omitted]atccaaacaatacacttcataacctgaaacctgaaataatttatctgaaaacatgtagctagcacagtctatccttagaagaggcatattcataaacagttggtgacacctagacacgacgtccctgggaacgtgcaccctatccttagaagatgcatatttataaacagctggctcctatgactaccatccaaacaaggataaccgacactaccttccccagaaattatatctcagttgtaatacccagacaggctacacatgaaattgcattactctgatgagctatactccaaatcagagagggacaaaggtaaaatcccaatggatattgtgaaatgcagagtgagatgggtacagcaggccccccaccctgccatggggcctccgctggggtccctccttctcacctccatagggtaaatgatggtttgggctgtggcaccagccagggagccagccacgaagcgctcctgcacatgcagtgtctcctgctgccccaggatggccctcttgatctgaggcggggagacacagggatgggtaggaccatgggggttgaaccttccttgcactccactgttctcctggcttccaaagaactggcttgctgcaggcattcatgcagaggagcagatgcctgatcctggggacctgtgttcaccacccacccccaagccaatcccgtaaatctttatgtacagcccagtcttccctatggcaagcacattcctccctgtacctgccctcacctgttcataggccatgaacttgatagctgactcgggggcaatcttgagtacattaataccattgccgcgccacagggagcggatgcctccctcaaggaccatgcttcgaagccccccaaggatgttcagccggttggtctttgaggcatggacctgaatggggagacaacagcttggaggtcccctcccaggtgtcaggcctgggggagggggcaggtctctccagagcccctcacctgcatgaagaccttgaggcggtccagaggggccgtgcctgtccgtgacacggcacctgccactgcgccggccaccagctgtttccaccacatgcccgtcagcttctcttgctttgagaactcgtccggcactgtcaggcactcgccaatgtccaggacctaaagatacaggtgttgggggtgtcatgccatggtggggacagggagatgtgactcagtcctaaataggggagtctcctctatgaatcctaggataccctagagtctgccaatgactcttgcttggagaccccagaagagtcctgttgggtcctaccaggtgtcaccaaagcatctaacctagcagcctccttagaagatcccaatatcctactaaatcccaccaaaggatctgccaaatcccactaaaggatcctattcaagtatctgccacataaagatccctccaggctagatgtgatgcctcacatctgtagtcccagcactttgggaggcccaagtgggagaatcccttggggccaggagttcaagaccagcctgggcaacatagcaagatcccctctctacaaaaattggccgggcatgtgcctgtagtcccagctactcaggaggccaagatgggaggattgcttgagcccaggagtttgaggctacattgagctatgatcacaccactgcatttcagcctgggaaacagagtaagaccttgtctgtaacagcaaaaaaagatccctcagggcaaatgagattctactgaaggatcccactcaagggttttccatataatgattccaaaagatcccttcagggccatacaagatcttaccaggcacctcccctataaagaccccagcagatccttctcagggacccacgaaatctcacagggatctcctccacatggagtccccgtgcaggaatcatttccagtctagaatttctaaccaaggtccccatgaatcgtctggggtgggagtctctggatctccaaagaggttctcaccagatcccacagacggatccccctccagatgccatcagatcctaccagacacattgctcatagacatttcacccaggaactagggatctagagcaaacccccactaccctctctagtggctcccattggatcctctgaagaccgtgttttttttttttttttttttttttttttgagacggagtgtggctctgtcacccaggctagagtgcagtggcacgatctcggctcactgcaagctcccgcctcctgggttcacgccattctcctgccttagccttcctagtagctgggactacaggtgcctgccactacacctggctcatttttttaatatttttgtagagacggggtttcaccatgttagccaggatggtcgcgatcgcctgacctcgtgatccgcccacttcggcctcccaaagtgctgggattttaggtgtgagccactgcgcctggccaagaccgtggtttttgaacgattctgttcagccgtagaatcttttatccaggcagagaacccagcagaagagagctgtgtgggtggaaggtgggaggccttgtaccccatctggtgagctctttcttccctgtacccgcaacccccacacgctgtccccagaggccccgatgtaagtctcaagggctgcgcttcaatcagacagcagagatgtcccaaatgggacccttgaaccctaagtggaggaagagaggaacagaccctcatccgtcagctgctgccagtgccttctccttctggaaagtcctggtccagcccatccaagccctggggagatcggagcaaggcccccctggggaagagggcacagccttcagctggggaaagccacccccacctcaccgtggaatgcttccagaaatacagcacgtcctccacattttccagcgaatgcaacaggaagtggtcgcgccattcttgccagtcaatggtcattgtgccgtctcggtccatgctggggggaagaaagggggtggaggaggacaggttcagtgcctgggggtgggctaggctggggtgaagttctgctaggttttgcagtttgggaggttcaagtcctcatatcaaccctattagagatgtagcaaatattaccatcattttcttttttctttttttttgagacggagtcttgctctgttgcccaggctagagagcaatggtgcgatctcagctcactgcaacctctgcctcctgggttcaagagattctcctgcctcagcctcccatgtagctgggactacaggtgcacaccaccatgcccagcaaatttttgtatttttagtagagacagggtttcaccatattggccaggatggtctccatctcttgacctcgtgatccacctgcctcggccttccaaagtggcaggattgcaggcgtgagccaccatagccagctgtattaccctcattttgtagagggggaaacgggctaagagaggcaactggtcccagatctgtctggcttcaatttgaatttttctttctttttttttttttttttccagaaggagtctcactccgtcaccctggttagagtgtcctggcctgatcttggctcactgcaacctccacctcttgggtttaagggattcccgtgcctcagcctccccaagtagctggaattacaggcatgcaccaccacgcctggccaatgtttgtatttttagtagagatggggttttaccatgttggccaggctggtccccaactcctgacctcaggtgatccacctgcctcagcctcccaaagtgctggggttacagatgtgagccactgcgcctggccagatctgtctgacttcaaagccccaacctctcagctgtatcctccttgggactgggtctggagcccagaagacagagatggccaaggggtcactgtgtcctgagttactttggattccagacccccagcgactcacctgtgcaaaattttctcagcctgctccagcgagatggaaatgcccagagctcggaaactctgttggatctcagagacatcaatgtgacctggggagggggccggaggtggggaaggatgtgcgtgtgaggacacctggggaaccccaggaccaaggatcagaacagcttggaatggaggtggtctagcaagatcaggggctccagaaacctaggaggaggtttgcagtagggctgtggggggacccctgactcactggggtcagagaggtggaactgggaaatactgggggggcttctctgttctgtaaatgaatgaaggaatccaggggtaattgtaggggtctctatgccatgggggattgagaggcaatatccacaacccagatgctgctatgaggggatctctgtcccacaggggacccaggaacagcatagggtatctttgccccatagaaaaatctaagggtaattatcggggttctgccccagtagggaaaggaggtgggatgggctggctgggcctcgaaccacctagctagggggtgaggagtgctcctgaaatagcctatgagtcatcggggagaagcggccctccccctctcctcctagcgctgccagttctaaccccactgatgtctctagggcccccacagccctatcccttggggcctgcaggcaggtcgcccgaccttaccatcctggttccggtcaagactgtgaaacatgagcagcagacgctgttcccgctcctgcagatagcgggaaaattcctccaggtcgagcccgccatctgggtcagcatcaccctcagaggagataccctgacagagggaaaggggatagaggtggctccaggaacctgctcctgatctggaggggacgcatgtcaccttatgccttaggaacccagagcccccagcgccttgaggaaggggatagaagacgtcaccccacttctccctcagtcagctaacttctcagccagatccctacagccaccacaggtctgtgcggtgggtgtgagtggtctagttttcctggtgagcaaactgaggctctgcaaggtcaagtcaccagttcaaggtcacagaaccaggaaatggtaacctcagttctcatctgtaaagcctgtccttccagctgtctcttgtttttagtttttgttatttttttaggtatctcattcctgttgaacccagctgcctcttaaaaaaccctgtccacatgggggacccaggggttccctttggaggaagccctgggcgatgtggggcaggagagaaccaagcggagtggctgaggccttggtttttcccatttgggaagtgggaggttggactgctctcagggttgctgtggttctcttagagcgatctggggctacaggtgtgggaaggacctgcaaagtggaggtgggggcagcgggaggaaagtcttgttataggtgcattcccagctgcgggtgaccgcagacaggattgggtccctggctggggcagcccgggacagtgagccaggcccgtgaacggcccatgaaagggcaggccagggaatgtaaacacagggatcggggcagctgcaggccagggcagtaggtgcccagaggatggagggtgtgtctcctggaggtgagagcagggcacgtcatgggctgtgcagtctggaggagggtgtgtcccgggcagtgggcaggaaagcgcccccatctcttcccaggcagacgccccctgccccgcagcagggggatcgggtgttggccgcggaactgcaggcttggggcctcggcgtccctgtcttgagcgatcccgttaggccaaacacgagtgggtagggggaacgagacagagacacaggttctggagtccagccacaggtagtccctggtggctccggccgcccagttcaggggcttgggtaaccgggagcgggcggggccgggaggggaggaggtccctgggggtgggggtacctgttgggcgccggggtctgggttgcccccgcccagcctggccagcccctggcgcaactcgtgcacgtccacgcggccatccttgttactgtccagctcctcgaacaggcgaccccagcgctgccgccgctccgcgtcgcccgggctcccccgcatggcgcccgcccgggggggaggggaggcccggcagcggcggcctcagtgggggcttcgcggctccccctccccccccgggaccccgcagggtcagctcccgcggccgccggctccgcagcctccgcgcagtccgctcggctctggcacttgcgggaggtggtgacggctagccgtcgccgcccgcgccagaacttgcgtctcctcccccgacctgcattggggggaggggaccgagggcggagctgggggcgtggggagggaatgtctgggatggtctggtattgcacagccgaggaacaccagagttccttctgggaagacgggctagggagctcagtggtctcaggtctggtttcagagttccgcctctgcgtgcctcagtttaccctttccccctttgcccaagggggcaaggtagagcgctgtcggggattgggtttcataatccccttccacttgacctccccgccacacccactaatcttcaggaactcaagttctcgcttttcccagacgcacgcaagaaccgtgcaccatctcgctcgctctctgcccgcccgcgccttacaccttccccgctcggccgcagaaacagaagatccaggagcgatgctctcccactgtcccttcttcccgcccgcgcgcttcctttctcggttcccactctgactgggaaacagaaaatcaacgcgcggcgcggctgcaaagtcggtttcctattggtcagcgcctcctgggctgagcccgcccgccccgcctcttctcccacctaggcggggcctccccgcagacccccgactgcctccagcccgcagtcccaccgcctgccaggagatcttaaaggggccgcggccgcaatcagacgctgagcggcgtggggagggggtggctcagtgacccgggcgcggggttgaggatcccagtggtcgagcgctggaggcagggccccagcctgtcgcactcgctgcacctgcggaatgtccctactgctagtttcgggcgcagtttctcgatccaccattagggggaagggagcccagaccacttgacagcgaatactcgataacaaatctcactttgattcagtgctttgcacatgccagggcttttactcacctctcgagtcgtctttgccaaaaccctataaggtaggtggtactggcgttcgcactttgcagataaggaagcggaggttaagtcattctccccagtcctgatgaccactaaggggcaaaacagggtttaaagagatctgggatccttaaccatcactctataccctagaaagaattaattatcttttttttttttttttttttgaaacggagtttcgctgttgttgctcaggctggagtgcaatggcgcgatctcggctcactgcaacctccgcctcccggattcaaacgattcttttgcctcagcctcccgagtagctgggattacaggcgcccgccaccaaacccagctaatttttgtatttttagtggagacggggtttcaccatgttggccaggctggtctcgaactcctgacctcgtgatccgcccgcctcagcctcccaaagtgctgggattataggcgtgagccatcgcacgcagcagtgagttttttttttttttttttttttttttttttttttttttttttttttttgagatggagtttcgctcttattgcccaggctggagtgcaatggcacgatctcagctcaccacaacctccgcctcccgggttcaagcaatgctcccgcctc[211 bp omitted]acggggggggggggtttcacctg[132 bp omitted]aagggtcctcaggagggggtcttgttattatcatcatcctttatccaaagatacagcattggccggtctcggtggcttaggcctctaattctagcaatttgagaggccgagatgggaggatcgcttggggtcaggagtttgagaccggcctgggcaatatagcaagacacccaactctacaaataataataataattattattattttttttaaaaaggaaagaaaacaaagatacagtcgtgagggcatatttagttcacgcccagcctctgcctagacaggtgtgctggaacaggtgtgccccagacaaatgagtctcttctaagaggctccccagcagaggttttcatttacagttgttccttgcaggtgccatacagcatggagtgatacagaggtttttttccatgtaagtgcccctaaataggtgttttctcacagatacattcttgacaggtgggcctcagtgtatgtgagcccctgccctgatggttttacccacagatgtgtgtcaatgtgagtgtgccccgtgcagatgttccaagttcttcccctcacttgagctcaattccatacaggtgttcctcctacaaggtgctttctcttacctcacaggtatgtttctgagcaggtttccctccacccatgaatgcattctacagtctcccgccccgtaggtgtgtttcagttaagtatacacccatctgggtatgtttccatacaaccgagtcccatacaggtttacgtaaatgcaggtgtgtctcatacaggtatttacaagacactgacacccaggaattcccccaatgcaagtgccgtacatttcataggtgagccatgcagatatgttcctaaaacaggtctattccacatcagagtgccttagttagctgtttgtgatgataatgcaggcgtgttctatagagatactgtccaccctggtggtatgtatccatttggttatatttcttttctttttttgacagtcttgctctgtcacccaggctagagtgcagtggcgtgatctcggctcactgcaacctccgcctccagggttcaagcgattctcctgcctcagcctcccaagtagctaggattacaggcgcccaccactacgctagctaatttttgattattttttagtagagacggggatttcaccatcttggctaggctggtctcgaactcgtgacctcgtgatccacctgcctcggcctcccaaagtgctaggattacaggcgtgggccaccatgcccagccttggctatatttcgtatagctgtgattcaatgcagatttttttttttttttatgagatggagtttcactcttgtcacccagggtggagtgcaatggtgcaatctcggctcactgcaatctctgtctcctgagttcaagcaattctcctgcctcagcgccccccgagtagctgagattacaggcacctgccaccacacccggctaatttttgtatttttagtagagacaaggtttcaccatgttgggcaggctggtctggtttcgaactcctgacgtcaggtgatcctcctgcctaggcctcccaaagtactgggattacaggcgtgagccgccgcacccggccatctgttttctgtatgttcttatatgtgaacacctgtgcagttgtcttctgtacaggtttggttccacacaggtgtttaccatacagctgtttttttgtttttaaaatttttttagagacagggtctcactttgtcacccaggctggagtacagtggtacaatcatagctcactcactgttacctccactcctgggcccaatcgatcctcccacctcagcctcccaagtagctggggctacaggtgcgtgccatcacatctggctaattttcttattttttgtaaatatggggcctccgtctgtgggccaggctgatctcgaactcctggcctcaagtgattctcttacttcggcctttcaaagcgctgggattacaggatcacgccaccgcccccggcttattttcttctttttatttatttgtttatttatttatttattttttgtagagaatgaggcctcgctgtgttgcccaggctggtctcggactcctggcctcaagcaatcctcttgcctcggcctctcaaagtgttgggattacaggcgtgagccattgcgcctgggcaggtattttttctcattaagcgctccccatccaagtctgccctaggcaggagtgcctagtgcacgggtacatacataccccgtgcgtctccacacctgtgcgctcccacagatatgctcgcaatgcaggtgtaaggtccccctcacacctgcgcgcttccgcggtctccctccccgcatccccattaagggactggggtcccgttacaggtgcgcccacagcgcggccccgcccccttcttgactccgccctctcagcgaggctcaggtgcacaagccggaagtgcgctctcccaggtgagtgactaaactttccgggtcacgtgacagggcggagccggtggggtcggacccacagaacgaccgacggaccgagggttcgagggagggacacggaccaggaacctgagctaggtcaaagacgcccgggccaggtaggaaggcaggacgcaccgctaggcctgccccctcgcccgtccaccctgcccgtcccgtcccgtcccgtcccgtccccttcctttccccagcccaggaacgcgctcctgggagttaatctttaatcgctgacctctggcggctggggcggggcgggactcatgggtgccctggcgccagttgtctctcctgtgggcctgcgccggggtccccaccccgatcccaacgcctgggcctctccttctcctgtccccaggtgccccgtcgcaggtgcccctggccggagatgcggtaggaggggcgagcgcgagaagccccttcctcggcgctgccaacccgccacccagcccatggcgaaccccgggctggggctgcttctggcgctgggcctgccgttcctgctggcccgctggggccgagcctgggggcaaagtaggtaccagctgagagcgctgggggggaggggtctggattcctggatctctgctggggacgtggcttagaagcgctgggtatctggggcgcagagagggtcaagaattggggagcggggaagaaataccttggggaggggtctacagggttagggctcggggggattaagatttctagtttcttccttggacactgggagttggtctaggagacctgagttccccagcgaggtggaattgtgtgttggagtgggggctcctaagtaggacttggggggaggtaagggctgcgtacctgagtcttggtatagtgcaggtgtttttgggtgaactgggagctgggaggaggcctgccgagccgggtcgacctggttggctgaaggtgtagaccccagccattcagtcttagatttgttttgggagcctgtggggaggtgtgagtcagacactccagggaaaagctaggcccgcccagatccttaagggcccagggccgagaggtgagtaggggaggggtggacttctggacaccctactgggctctgcgggactgggtcgggggggtgtcctggggagcaaacacccaagggagaggtcttacctgcaagacacccaaccatctctgtgcgaatgaaaggcagagtttgaattgggacctgctagggggaggtgaaggggaatgcccaaagcaggtgcagatgggcggggatgggagagaaagatggagactgagttattctctgccttcaccctccacagtacagaccacttctgcaaatgagaatagcactgttttgccttcatccaccagctccagctccgatggcaacctggtgagttggaggtatatgtgggaagatggcagcaaggatgttatctaggggtcacacatatagcatgtagagaggactagacaccccctccccccagaggtggcaggtcagggtggctttggagagctctaagtaggagagacctgaagtcttagaccaagaagactaggacaccctggagggagtgggcaggaatactgtagctgtcagatgtgtgggctcaggaattccatatgcctctcaggtgggtgggggagcaaggagctcagacttggtagatgtgatgaaagcaggagtcccggccgggcgcggtggctcacgcctgtaatcctaacaccttgggaggccgaggcaggaaaatcatgaggtcaggagtttgaaaccagcacggccaacatggtgaaaccctgtctctactaaaaatacaaaaaattagccaggcggggtggcacacacctgtaatcccagctacttgggaggctgaggcagggggaattgcttgagcccagaaggcggaggttgcagtgagccgagattgtgacactgcactccagcctgggcaacagagcaagactcggtctcaaaaaaaaaagccggagtcccagacatggcaggtgcttgcgaggggtgtcccggacatggcaggtggtggggagccttcgcaccccagacaaggtaggtagggatccaggaagccccactgtggggatcagatcaccaaaagtggcagatgtgtgtatgtgtgtgtgtgtgttgtggggtagggggtgatgagggggatgccattcaggtggaggtggacaggctacccaggctcaggtgattcacacctgtcccctctctgcagcgtccagaagccatcactgctatcatcgtggtcttctccctcttggctgccttgctcctggctgtggggctggcactgttggtgcggaagcttcgggagaagcggcagacggagggcacctaccggcccagtagcgaggagcaggtgggtgcccgcgtgccaccgacccccaacctcaagttgccgccggaagagcggctcatctgaacgctggggcctgctgcagccaccaacactgcccaggactgcgggttgctggcttgtacaccgcagctgccaccgagacaccagcctctgatggctcaggaggacttgtggggagaggctgggggcacccatgtggtgggctctgtgcagcatgttgcctctgcttggctgtgcctgcagctcagggtgctggggctcgggacccacccccctgcttgcggaaccaacttttctctgtgtgtccagcaggccccacaaccccctctcctttctttcagttctcccatgcagccgaggcccgggcccctcaggactccaaggagacggtgcagggctgcctgcccatctaggtcccctctcctgcatctgtctcccttcattgctgtgtgaccttggggaaaggcagtgccctctctgggcagtcagatccacccagtgcttaatagcagggaagaaggtacttcaaagactctgcccctgaggtcaagagaggatggggctattcacttttatatatttatataaaattagtagtgagatgtaacaaaagctttattggtgtgtttgagctggtgggtgcattagctgagatggaagtgacaaatgccgagaggaattgtaaggttgccaggattctagaagaccaggaggcttcctggaattccctgctaggagccagttagagaggctgcccttggagggacagaggtgggtgggatggatttccgagcagagtgagggcaccagagaaattcaccaggaaaaaaaccagcttttttgggctcttgtggctttattgagggactggggtctctcttggacccctgattcttaaccctcaaagcacttcttaagatcagcgactctgggccggctgctgggctgggacttttgacagttgctggtgggtgtagcaggggaattcagggctcctggttcctcccgtggctggaggtgagcgcgctctgccagcagggctttgggaggccgggctctggggtcctccagagaactggggtctgaggaaggatcaaggggctgggacgtccaggctatatcaaagttgggctttgtgggggccagaatttgggggctttctggagggctgggctcagtgggtgcagtggagagccagggagtggggttttcctgggctgtagaatcttcagctgccttgtgggaaggggtgagatgaagaattaggggctctgtgagaggagagggtttggggtccccccagatgcttgggtctgcagaagctgttgaggactgggatggagacgtgacttcttggtcggactctgagggtatcagctgggacctggagtcctttgaagagctggtggcatccaaagacgaggcattttgcagggatggcagggaaaggggctggggctccggctctggtagtttcttatcgtctggttgccatcttggtatgttgggctaggtgagatggatagggaagttgtggcttttagatggcagaggggctggcaagttggatggaccattaggggaagacttggggtagggttgggggagtgggcgaggctctcaccaggctgaagcagctgtccaggtctcctctgtgacagcagtctaaactctggctcggtctcaggctgcctgcgctcttggctcccatgctaagactgtccagaatctcgctcaacaaatccagttcttctccagaccccaagaagctgctgtccagagcttcttctgcccacgggcacccctcatcctcagggctcagtgggggtgtcctgggtgaggatgggcagcctcagatatttgcccaagacccccagccctggtcaggctgctctggagtttgggaaccctcctccccatcagtcctggcctcccactttcaacactgctgttccctttttgccttaccccgcccctgggggctcggaagttccctcttccagctggcgtctcctgctggggcgaaggggccggttctgcaaagggtgggggcgataggacctcaggagactgcagaatcggggggctgaggcttgctggagaagggtgagtgtgaagtgggtgccacatatttggggagttgaagaaggaggtgagatgtctggatggggactgggatgggtagaggattcagtgataattccaggtgtgtgcatggggggaggggcgctctcacctttccaaagtgctgagtgattgggaggcgttgctgcaggcggtctgagcggctggggagggctggggccctcagagagccccccctctgcaggacagagtccccatcctaggaagagaagagtgaactgggaacctctgccacagagtctccccaccaccccctaccattggtctttagttagtctttttttttttttgtttgaaatgaagcttcactcatgttgcccaggctggagtgcagtggtgccatctcggctcactgcaacctctgactcccaggttcaagcgattctcatgcctcagcttcccaagtagctgggattacaggcgtgcgccaccatacccagctaattctgtatttttagtagagatggggtttcaccatgttggtcgggctggtctagaactcctgacctcaagtgatccaccctcctcggcctcccaaagtgctggggttacaggcgtgagccaccgtgcccagccacagtcttcttttttttgagacagggtctctctgtcacccaggctggtgtacagtggcgctatctcagcttactgcaacctccgccttctagactcaagcaatccatattcagataatttttaactatttttttgtagagacaaggcccc[132 bp omitted]tctgcacccccttcaagccactcttggcctataaaggagtggacagagaattacccaagggtggtgggatcctgggcatttgagagctcagccttctgtcccctaagatagcttttttttttgccatctgcatgtctcaaatacgttcaccaccccccatacaccacctaagaagtcaatgcaaactttcacccctttgactaatataaaatgagtattcctggaggcagtcatccccaaagaaaatggggagtggcaaagcaacagggcaaggtgttcctgtttcaaagcggtgaagaacaaaatcgcacggacaattttgagctgcaaaaattggccccaggaaacttctgagcttgggagataaaaggcagaacctggaattgtagcatccaaggacaaaaagaatgtttgccagcaaatcttggctgtcaattttaaaggggccgtgggcggggcggaggggggcgggtaggattccaacaaaaaatgagtataataaataaaaaataaaagggggaagagttgttaatggtttaactgctggttcagttctgattaaatcatttgtgtttaaagtgtctgccagggtcaaaatactccatccttgggaggtcaaagtgtcctctgtcccctccccctcgtcaccccagcaagagtggcctgtccagctcagcctcaccgagcggtacatgttcttgacggctggttgggtcttggccttgactgagtgcaggagggcgccaccacctttctgcgggagagaagataccaagggggagaggctagggccagatcccacctccccatcccaggttgtgtgatgccaatcaagcccctttccctctctgagtctccattttttcacctctataaatgaacatgatcgtagtcatgaccctacctggtgacttgcggagttaaattaatccaatgagacacacttaagtgttttgtttttgtttttgttttttttgagatggagtctcaaagaacagtttttttttgttttttttttttttttgctgagatgcagtcttgctctgttacccaggctggaatgtagtggtgccatctcggctcactgcaacctccacctccctggttcaagcgattctcctgcctcagcttcccgagtagctgggactacaggcgcctgccaccacacccggctaatttttgtatttttagtagagagagagtttcaccatgttggccaggatggtctcgatctcctgaccttgtgatccgcccgcctcagcctcaaactcctgacctcaggcaattcgcctgcctcagcctcccaaagtgctgggattacaggcatgagccaccgtgcccaggcaacaaagtggtttttgagacagggtcttgctctgtcacccaggctggagtgcagtggcatgatctcggctcactacaacctccacctcctggggctcaagccatccttccaccttagcctcccgagtagctgggactacagctacacctagcgaattttttttttttcagtagagatggggtttcgtcacgttgccctaaccggtctcaaacttctggtcgcagcaatccttctatctccacctcctaatgtgttgggattacaggcctaagccaacgcccacggcctattgttctggtggtcttacctttagattgtcggcccagagctgataggatcgaagggcccctggggtaaggagagagtgtggtggtcaccgaaggctggctgaggctgggggtgctggtggcgggtagtgggggacccaggggctggactcagggctcacctgaggaggccccgcagccagtgatctcctgctcgaattgatctgagaagccctcccccttgttgagcttctccagccgggcttcgatgaactggggtgggggacagtaaatcagaaacagcaggagacacatctgaatgccagcacttcgaagcctgcctgctgtcaagatgtagaagccatctctggcctccaacctgcccacccccaagcacctgggaaactggagcccactttattttttatttttattttttgagatggagttgctctggcacccaggctggagtgcagtggcgtgatctcggctcgctgcaacctccgcttcccgggtttaagtgattctcctgcctcagcctcccaagtagctgggattacaggcatgcaccaccatgcccagctaacttttatattgtttgtagagacagggtttccccatgttggccaggctggtttcgaactcctgacctcaggtgatccgtctgccttgggctcccaaaatgctgggattacaggcgtaagccactgtccccggcccggagcccactttagaaaccagagatcctaccttctcctccctccccgagtcaggacctgtccccagggaccaagccctgcccctttcagggacccagaaattgatttctgccccctctagaactacccacccgctctcattgaatcaagagtaggtggaccccatctttagggatcttgtggtccaagctaccttctcccaggggcctagaagtccagccctatgtgccaccccgcccccccacccatatccctaggactcaggaaatcctgggatttcacagtcaggacccatcccctctggagtccagcttggaccgccaccccagtcccagaaagacacctgcttagggacctgcgaatttggtcccaccctgatttccctcagggacctaggagtaggtcttgtcccccaggaacccaggagttgggggctcccatgtttttgttttgttttgttttgtttgagacggagtctcgctctattatccaggctggagtgcagtggtgtgatctcagctcactgcaacgtctgcctcccgggttcaaacgattctcctgcctcagcctcctgagtagctgggattataggcgcacgccaccacgcccagctaattttcgtatttttagtagagatggggtt[133 bp omitted]tcagtccttccccacttgggaaccctggagtaggggatcctgctggactgtctccagctataccctcagggacccaggagtctgccctcaaccctgccagttcagacaagccctcggggactcagcagtccacctccagtcccagctggaccctcagggctctggcatacctgtttgaacagctgcaggtgcacagcccgccggtggaaggcctgcagaggtgccccaggcttctgggccaagaagacttcctcactgaaggtcactggctggccctggaagaagcgttggagttctgagctccctggggtgctcctggccctccctcattctactatatatttatgtagcaaacattgattaggcacttgctgtgtgtctgatcctgtgtggggcctcatggatggcagggaggacttaagctgttttttgtttgtttgtttgttttgttttttgagacggagtctcgctctgtcgccaggctggaatgcagtggcgtgatctcagctcactgcaacctctgcctccagggttcaagcgattctcctgcctcagcctcttgagtagctgggactacaggcacgtgccaccatgtccagctaatttttgtatttttagtagagactgggttt[131 bp omitted]tttttttgagtcagggtctcactctgtcacccgtgctggagtgcagtggtgtgatcttggttcactgcaacctctgcctcctgagctcaagcgatcctcccacctcagcctctcaagtagctgggaccacaggtgcacgccactgcgcccagctaatttttgtagtttttgtagagacagggtctcactgtgtttcccaggctggtccaaactcctgggctcaagcaatccacacaccttggcctctcaaaagtgtgagtcaccgacccggctgatttaagcatttatctcgagtaaggtggaagcccgggaggggtgtgggcgggggggtggggggagggaaatgatctgactcgggtgttcacaggtgacctctggccactgcagggaggacagactctgggagataaagcagagggctgcttgcaggaggccgggcgcggtggatcacacctgtaatttcagcactctgggaagaggagatggatggatcacctgaggtctggagtttgagaccagcctggctaacatggtgaaaccccatctgtactaaaaatacaaaaaattagccattgtggtggtgcatgcctgtaatcccagctattcaggaggctgaggcaggagaattgcttgaacccaggaggtggaggttgcagtgagccgagattgtgccactgcactccagcctgggcaagagagcaagactctgtctcaagagaaaaaaaaaaaaaaaagaagaagaagaagactgcttgcgggggagtcccagtttttgggagagatcagtgcattaattttaggcaaacaatgagagggtccaggccagggtggagacagaggaagtgggtggtctgtgtgcagattcaggatgcagagatgacaaaaacgtcagatgctcaagtgatactagaaccccccaatgattttacagattggttgtgaaaaacaggggagggggcttcagagatcaaggccccggcttcaacattcacccactgtgggacttctccaaagccttggtttcctcatatggaaaatgggactatcacagtatccatctcaaaatgttatgagcattaaatgagataatagcagtggtaggagctagcatttattgagtgcttgctgtatgtcaggtacgattcaaagtgctgggaaaatgctgattcactgattctaatatccttttgggtggcactattggggtcccattttacagaggggcaaacagaggcacaaagtaagcactccattaatgctacctatcattattattttttaattaaaaaaatatatagagacggtggccgggcatggtggctcacacttgtaatcccagaactttaggagcctgatgcgggcagatcacctgaggtcaggagttcgagaccagcctggccaacatggagaaaccccgtttttactaaaactacaaaaattagctgggcatggtggtgcgcacctgcagtcccagctacttgggagtctgaggcaggagaatcgcttgaacccgggaggcactccagcctggggaacagagtgaaactctgtctcaaaaacaaacaaacaaacaaacaaacaaacaacaacaacaacaaacgggaggggtctcactgtgttgcccaggctggtcttgaacttctgggctcaagcaattctcccatctcggcatcccaaagtgttgggattacaggcgtgagccactgcgtccggccatctactgtacctatcgttacattgcgattcattcaggaacccacgagacctctcccgcagcgtccccgctgctcaccgggctgcagacgagtgcgtcgcggtaccccccgaagagcagggcctgggctttgaggaagagacgggacaccccttccccgggggccagggcgaccttcctgagccggagcctcagcagggacacctgaagcacaagggagtggccctgagtgggcaggtgtgggcccctcgcctcccggggcaggaaggtgggaggggcgacactgaccacgtctggaggcagcgcctgcacgtcgttaaaggtcgtctccaaggtattggcgtccacgttcagcaccacgacgtcctccagggctttttctcgtactctctgcggaaaagcggggtcggccgctcagagcccgggagtccttggcagaggagggcatctggggatgtagaggaagggggaaccctcacgtccccgtcgtctgggtagatccacgctcacctcggcgagactggcgtgcactccaatgaggtagggcatgggcgcgctgcggaccgaggggacggggtcatgcaggcaccgcccccagggcctgcccacaggccctgcccctcccagctgccctcgctcaccagcagtagtccagcaggtgtgggggcagcgtggggatcagcacgtgctcccagcgcatggggtacaggagcgcgcaggacgcgtggacgcacgaggtcagctggggagcgatggcggggcgtggagtcagggcctggaccctctagcgcgaggtctcttccagctgcatttcccacgtccccagtctcctgttccccctccccatccactgctggataatgagtgacaactcgaacccctttagaaatcatgtggagaccaggaatttggccacttacagtgctttaagcgggtgaagccaggactcataccgtcctgatccctctctgtaaggggcgcagttaataggcaacacccctgagtcttccccatgcaggtagagcaaggactgagcctccactgactccaccccgaaagaggtggagctatgacgtagaccgcccttgtcccgcccctaggggtggatccaagacgtaaccccacccaaagaggtggagccggaaggcaatcatttggccccgcccctaggggtggagccagtctccacgtctgcctttgaccctgggtttcagggtccctgggagtatgggtctctagttttttgcgccccttgttatctgagtccctgtgttcctaggtccctgggtattcgggtccctgggtcctcagatctctgagtccctgagtccctgggtccctgggtccctggattcccacgtgtataagtccctagttctcagtgtccctgagggtccggaggggtggagccagacgtgttgcggcccatagtgggtggagcctgagcacagtactcccaaaaaggaggagctgcagcgcagccccctcccacgagggcggggccagagttcaactctccaagaccttcgaaggggcggggccaggacttcgccctcgggtctcgcgcagtagggttagagccaggaatcagcccccttgtcccgccccccggggcggagccaggccctgctcccaccccggcccggcggaccccgcctcacggtgctgagtttgctggcggtgagcaggactcttctctcggccaggagcgccgcgaacagccccacgatgttctcgtcagtcacggccaccaccagctccgttaggttcctctgaggatcagagagtcgctctgggcgtggacgggcccctggatcttgcatccccggtccgggtttcgggacctgttctcacccccagagacccctccccactcacgttctcagggatggatggcaggcggccggagtccggggccacgaagcaggaaagctggtgggggtattggcagggggatcaatcagtcaggaggctggcctcacctggacccccgaccttccagggtccccgagccccgctcaccggcttgctattcccccgggtagggggggggataccctgcccgctggagaccgtcactccgctgccctggggaagaggcacgactctgtggtcatgatggctgggacgcagccttcccatccacctaaggtccagcgcccagggaatgggagctactcaccagctcaagccccactgaggcctggggcccagacagggactgctgaaacagattttgaagaagttcctctgcctcggtgacctgggtgggacgtggaggggcgggggtggctgagccagatgtggggattggggattccgagggctatgactaaggttgagtggtctgggaggagccaagggctcaggtcagtcctgggagtttttttttttctttctttaaaagaaattaataataataataataataataatagagacaaagtctccctatgttgcccaggctggtcttgaactcctgggctcaagggatcctgctgcttcggcctcccaaagggctacaattacaggcgtgagccaccgcgcccggctttttaaattttttaatttaaatttttccttgtaggccgggcgcggtggctcgcgcctgtaatcccaaccctttgggaggctgaggcatgcggatcacctgaggccaggagtccgtgtccagcctggccaacatagtgaaaacacgtctctgttaaaagtacaaaaaaaaaaaaaaaaattagccgggctggtgggccgcgcctatagtcccagctacttgggagactgaggcggaagaatcgcctgaacccggaatgcggaggttgcagtgaggcggaatcgcaccaccgcactccagcctgggcgacagaggaagactccatctaaaagaaattttttttcttgagacagggtcttgctctgtcccccaggctggagtgcagtgctgcgatcatagctcactatagcttcgaactcctgggctcagttgatcctcccaccttgctctcctgagtagctgggaccacaggtgtgcaccaccacgcctggctaattttttatttttattttttgagacggagtttcgctcctgttgcccaagctggagtgcaatggcgcgatctcggctcactgccacttccgcctcccgggttcaagcgattctcctgccgcagcctctgagcagctgggattacaggcgtgtgccacgacggccggctaattttttttttttttttttgtatttttagtagagacggggcttcaccatgt[135 bp omitted]tgttgcccagctggtctcgaactccagggctcaagggatcctcccacctcggcctcccaaaatgcagggactacaggtgtgacacagtgtgccctgccaagcctgggagatctgagagggaggggttgggaggttgaggggggtgggggctgggactcccacaggagtgagagaggggctggtctcacttggtcctgggctaggaggtctcccactgtgttcaatagcttgtaaaacacctcgaaccaaggcaggtggctgtggagagaggagacaggttccacgaagtgtccctaggcctcggcctttcccatccccccctccaacccccatatcccgcacctgaggatgcagagacagctctgggtacccgcccgcaggcggcagaaaccaaatctgcggttgccggcaaggtctgtgagggcgaaggtgaaatgctgcacggcggggctggggggctccctggagtgggaagggctgttagagagacctggacatcccagctgtctgaggatgtccccgctccccaacaaagctcctaggaccctgagtgtatgggtctctagttgtcaggatccctgaatgtctggatccctgggtctcagaatccctgggtccctgaatctctgggtccctggatctctgggtccctgagtccctgggtccctggatctctgggtttctggatctctgggtccttgaatccctaagtccctgggttcctcagtccctgagtccctgagtccctgagtccctggtccctgagtttctgagtctctgggttccgaagtccctgaatccttgtgtccctgagtccttgagtctctgagtccctgggtccctgggtccctgggttcctgagtccctagatctctgggtccctgagtgtctgagtccctggatgctaatgtatataggtccctagttctcagggcccctgagtgtctgagtctctgagtctcagggtcctcgagtgtatgggtttccagatgtctgagtctctaggtgttgagtccttggggcccctgagagatctgagtccctgagtccttggatctccccgcccttccgtacctttccacatcaaaagggaagcagaatttaggcaccatctgcatagcttcctggaggtgaagaaaagcgcagactgcttggccactgaggtcgggcaccacctccctgggctccaggtccaagaaaccaagtcccctccccctgggagactggccctcgccctgggggagcaaggagccagcctgaatacctggtccctgaagtctggagggaactgccgcaggatggggggatctgtagaagagagcacgcctctaagttcagcgacccaggcccaccctcccctcccactccctcactcccaggctcccaactcaccctcctgcagggaggcagggcaggccgcttcgaagaaccaatcaaacacagcaggggagccccctctgtgggatgcagaaggggtccagagacttgcttctatgcatgtgtggttgtgtctgccactttgcacacaagtgtggttgtgtgtgcatgtgccacaaggtgcgtcggcatgtgcatgactctgggggtttgtggctgtgagtgtgtggttgtgtgaggctgtgtgtgcagcagtgttaattgaacacacaagtacaggatggagtgagaaagtgtgactgtgtgtgtgtggctgtgtatgattgtgtgtggctgagtgcatggcttttgtgagcaggcagtgtgtgtgtgatcctgtctgctgtctgcctgaaaagatgagactgtctcctatatctgtggcatgagactgcacagatatgaaggacagcccgtgcagtcccaagctaagtgaattacatctctctctctctatatatatatccatctatctgtctgtctgtctgtctctgtctatccatccatccatccatccacccacccacccacctatccatccacccacccacctatctatctatctatctatctatctatctatctatctatctatctatctatctatttttttgagatggagttttgctttgtcacccaggctggagtacagtggcacgatcttggctcactgcaacctccaccccacaggttcaagcgattctcctgcctcagcctccctgtagctgggattacaggtgcccgccaccacgcccagctaattttcatatttttagtagagacagggtttcacatactggccaggctgttctcaaactcctgacctcaggtgatctgcccgcctcagcctcccaaattgctgggattacaggcttgagtcactgcatctagccatgccatctatattttcttgtatagatgtgagtgtgtgtgcccgagcaagtgaatgacatctatattttcctgtacagctgtgagtgtcactgggtaaccgcgtgggatccttgtgggctggctgtgtgtctctgtgtgtgagaccccatagaaccctcgtggctggtcccacatgtctcatcagagaaaggagggcaggatacctaggtacttactgtaagccctgcaatctctgctttcctcctctgcccccatatcaagcagaagaggcagccttgggctcaaggagagagacagggagatctagagggagatcagctgcacacacactgtcccgcccagttgcacacacagtccccaccatgggtaccccagcacttcaccctcacgccgacacaagtcacacacgatcacccactcataccaacacccagcctcccctctgccctgatcatccgccctgtggaccccctgaagccatcactcagacataccaaggacaaagctcagaggggtacatgcattcacagagctatagacataatcacaggagctggatagagagagagagagagagagagaggaggggaccgagagtggcctgtcccagagtgaaggtcatagcggaggcccatggagtatctgattccagccacctgccctggcaggtcactgcacctcccgggcctgctccagccccagctcccctctgccccggctcaggcctggcccgggaatcttgtaccagagaatgagggatggggtggctcttactcagctctggattccatggtccctgcagggccagcccagcggggccctctccccaggggtcctgggggcctgtgtatgctgggccccaagccggctcagcttcctgtgtggctgagagaggaagtttaacgggtgacgtccccggacagaggccctgcccccacccccgtgagaaacccaggcatcctgcctgctaattatgttggggatgggtgggcaataagtggtcagcctgggaaggcagacccccagctccgtccccgccaggctggactgtgtctggttccccccatcgtgcctgggccctcatctctccttccccgctccgcagcagccaagattcacagtctgtctattaatgaaatgcctccccgtctctttcccttggtccatttggcctggacggtcactggtggaccaccagagggagccacctgtaaagtggacggtgggggggccagggatggggacaaagagcacgaagtacaggcacagggacggacagacagacacagacacagacagttacacgctcaggaagtcatcagcacagacaaaccgagtgcagaagagccagagacgacagacatggagagatagggagtcctacagctggatcatagtcccaggccgggcacagtggctcacgcctataatcccagcactttgagaggccaaggtgggaggaccgcttgagcccaggagttcgagaccagcctgggaaacatggcgaaaccctgtgtctataaaagctacaaaaattatagctggcggtggtggcacgcacctatagtcccagcttacccaggaggctgagtcaggaggatcgcctgagcctggggagtttgaggccatagtgaaccaagattgcactactgtactccagcctgagcaacaaagtgagatcctgtctcaaaaaaaaaaaaaaacaacttagtcacagttacacacccattgtgcgcagaaagacaaggtaagcggatcacttgaggtcaggagtttgcaaccagcctggccaacatggtgaaaccctgtctctaattaaaaaaaaatacaggccaggtgcggtggctcacatctgtaatcccagcactttgggaggctgaggcaggtggatcacgaggtcaggagttcgagaccagcctggccaagatggtgaaacccagtctctactaaaaatacaaagattagccaggcacggtggtgggcatctgtaatcccagttactcaggaggctgaggcagaattatttgaacctgggaggcggagtttgcagtgagccgatatcgcgccgctgtactctagcctgggcgacagagcaggactctgtctcaaaaaatcaaaaacaaacaaacaaacaaaaaattagctgggcatggtggcatgtgcctgtaatcccagctgcttgggaggctgaagcaggagaatcacttgaatccgggaggcagaggttgcagtgagccgagatcgtgccactgcactccagcctgggtgaaagagtgagactccatctcaaaaacaaaaacaaaaacaaagcaaacaaacaaacaaacaaatgcagagacagacagagacacaataaacagttacacagagaccacagccattgatacaaacagaataacagagaaatagacccagatagatggaaacacagcacagacatagctcaagtaataaccagatatagttatagccaagacccggccacatgcagagagagacacagctggactcacatgacagccagatactcatgacagcccgacacactcaagccgtgctgcagactatgaaagacacaggggctggaggcagtggctcagtaatcccagcaccttgggaggctgaggtaggattgtttgaggccaggagttaaagatcagcctgagcaatataacaagaccccatctttacaaaaattaaaactttagccaggtgcagtagtcccagctattctgtaggctgaggcgggaggatcccttgagcccaggtggtgggggttgtagtgagctgtgatcgtgccattgcactccagcctgggcaacggtgtaagaccctatctccaaacaaacacaggaacaaacaaaaacaacaaaaaagacacaggcacacaggtggacagacgtagtcatgttgagacaggatatgtgaacatatctgcaggcacaaaaacagaacatgatatagtcagggtcacacctacacatgaaatcctgccaacagactca[131 bp omitted]agaaaccccgtctctactaaagatacaaaattagccgggtgtggtggtgacacatacttgtaatcctagctactcagggggctgaggcaggagaattgcttgaacatgggaggcggaggctgtggtgagccaagatcgtgccattgcactccagcctgggcatcaagagcaaaactccatcaaaaaaaaaaaaaagaagaagaagaagaagacacctcgtacccacagtcactggacacatacagagtcagaatcccgtcagccacatcctcacacagtctgatggacatgtgctattgtccgaatatgtgtccctccaaaattcgtatgttgaaacctaaagccccaaggcagtagtaagaggagccgagattgcgccattgcactccagcctgggcaacaagagtgaaactccgtctcaaaaaaaaaaaaaaaaaataggtgaggcctctgggaggtgatgaggtcaagaggtatccaccctcaacagtgggattaatgcctttataaaagaggcttgaggcccagtgcggtggctctggcagggtgcagtggttcacacctgtaatcctagcactctgggaggctgaggggggtggattgcttgaggcagaagtttgagaccagcctgggcagcatggtgaaaccccgtctctacaaaaaatacagaaattagctgggcatggtggtgtgcacctgtagtcccagctacttgggaggctgagtgggaggattgtttgaacccaggaggcagaggttgcagtgagtgaagattgcaccactgcactgcagcatgggcagcagagagagactctgtctcgggaaagtaaaaaataaaaaaataaaaataaataaataaataaataaaaagaggtttgagctaggtgtggtgatagcgcctgtagtcccggctacttgggaggctaaggcgggaggatcacttgagcccaggagttcaagcctacagtgaactttgattgcaccactgcattccagcgagtgacagagcaagactctatgttaaaaaaaaaaaaaattaaggctgctatgacaaaatatctgcaacctctgcctcccaggttcaagtgattctcctgactcagcttcccaagtagctgggactacagatctgtaccaccatgcgtggctatgtagctagctacttgggaggctgaggcaggagaatcgcttgaacctgggagttgtagtgagccaagatcgtgctattgtactccagcctgggtgataagagcgaaactccatccccctacccaaaaaaaaagagagatggggtcacactctgtcacccaggccgacgtgcagtggcgccatcatagctcactgtagccttgacctcctgggctcaagtgatcctcccacctcagccccctgagtagctgggactacagttgtgtgctactgtacacacaactgtttttttttttaaatttaatttaattttatttttgagacagggtctcactctgtcacccaggctggagtgcagtggcacgatcttcactcattgcaacctctgcctcctgggttcaagcgattctcctgcctcagcctcccaagtagctgggattataggcgtctgccaccgcacccagctaatttttgtatttttagtagaggtggggtttcaccatcttggccaagctggtcttggactcctgacctcgtgatccactgatccacccgcctcggcctccaaaagtactgggattacagccatgagccaccacgcccggccctttttttttttttttttttttttttgtgagacggagccttgctctgtcacccaggctggctggagtacagtggcgcaatcattgcaacctctgcctcctgggttcaagcaattctcctgcctcagcttcccgaatagctgggattacaggtgaccgccaccacgcccggctaatttttgtgtgtgtgttttagtagagatctggtttccccatgttggccaggctggtcttgaactcctgacctcaagtgatctgcccgccttggcctcccaaagtgctgggattacaggtatgagccaccgtgcctggtcagctcagctaattttaaaaaatatttttgtagagatggggtttcgctttattgcctggtctggtcttgaacttctggcctccagcaatccccaggcctcggtcttccaaagtgaatgggattacaagcacgagccacagtgcccagcctgtttttatttttattttatttatttatttattttttgagatgaagtctcactgtcgcccaggctggagtgcagtggcgtgatcttggctcactgcaagc[259 bp omitted]cctctctgtgtctcctaggctggagtgcagtggtaccattatagctcaatgccacctgtaactccttggctcaagtgatcctcccacctcagcctcttgagcaactagggttataggcacagccaccacacatcgttaatttttttgttgtttttgagacggagtttcactcttgttgcccaggctgagtgcaatggcacgatcttggctcactgcaacctccgcttcccaggttcaagcgattctcctgcctc[131 bp omitted]ctcagcctcctgaagtgctgggattacaggtgtgagccactgcgcctagcctttttatttttatttttaatttttttgagagacagggtctccatctgttgccctggctggagtgcagtggtgccatcatagctcactatagtctcgaactcctgggctcatgttatcctcccatcccagcctcccaaggagctaggactacagcaatgtgccaccacacccagctaacttattggaacaattttcatagagacagggtcttgctatgttgcctagggtggcctcaaactcctggcctcaagagatctttgtgcttcagcctcccaaagtcctgggattacaggtgtgagccacagtgcctggccgagccagtagcatttatcttcaaatctctctcacttgctgggactcctgcttttgtcctcacttcttctctgactctgatcctctgtctccctcttataaagatccttgtgattgtattggacccacccaaataatttgccataatcctgttatcttaaaatccttaactttgccaggcatggtggctgacgcctgtaatcccagcactttgggaggctgaagcctgaggatcgcctgaggccagaagttcaagaccagcctgggcaatatatcaagat[137 bp omitted]catggtgaaaccccatctctactaaaaatatggaaattagccacgtgtggtggcgcatgcctataatcccagctactcggaaggttgaggcaggagaatcgcttgaacctgggaggtggaggttgcagtgagctgagatcatgccatggcactccagcctgggcgacagagtcagactccacctcaaaaaaaaaaaaaattaaaaattagctgggtgtggtggtacacgcctgtagttccgaatcaggaggctgaggtgggaggattacttgagcccagaaggtcgaggctgcagtgaatcgtgatcacgccactgctctccaggcaatagagtgagactctgtctcaaaaacaaacacaaaaaaacctacacctggccggacgcggttgcttgctcttgtaatcccagcactttgggaggccgaggtgggtggattgcttgagctcagggatcctcccacctcagcctctgaccagcctgggtatcatggtgaaacgccatctctacagaaaagctagctggcatggtgacacatgcctgtagtcccagctacttgggaggctgaggtaggaggatcacttgagcccaggaagtcgaggctgcagtaagccatgattgtgccactgcgctccagcttgggtgacagaaggagactaaaaaaaatgttgaaccccccaaagcaactgcctcatcaaagtttggggaaatactttaaaaaaaagaaaaaaagaaagaaagaaacaaacaaaaccaggctgggtgtggtggctcacacctaatctcagcattttgggaggctaag[137 bp omitted]tgaggcaggagaatcatttgaacctgggaggtggagattgcagtgagccaagatcgcaccactgcactgcagcc[156 bp omitted]tactaaatatacaaaaaattagcctggcgtcatggcgggcgcctgtagtcccagctactcgggaggctgaggcaggagaatggcgtgaacccgggaggcggagcttgcagtgagtcgagattgcgccactgcactccagcctgggcaacagagcgagactgcatctcaaaaataaataaataaataaataattaataaactaaaaacaaaaaacaaaaaagcaaataaaaagtccgtacacttctgagtagttaagtgccttgtgcaaggaaggaggatgctgagtggggaacccaacccagatctatccattatgctgctacctaaatcctttgtattgctggtctaccacccagtgctgtgctgtgctgtgctgggcctgctgaagttgccgtgggctgatgtccacgctgcttccctcatgcctctccttactcctggctgcagggggacgtagcaagaagactgaggctccagcctgggtgcctggtgtctagcatagagtggtggacgttactgcttggctctccgcgtgtccccctctcacctacccttgcccctggctcgtcttcctaatgcagacgctgcaaaaaacccctccaacccctacatttcccagatgcctttgctgctccgtttctggatgcagaattggttctaccaatgagaaatgctcatgagagatttagaaagtggaagtgaggcagtgtgggcttgtgtgtatatcttgctgagaagcagggttgtggagctatacattttattttcatgaattcgtgttctttgttggacccatttccaggtcatagttctggtaactgcctctttgttctccacctttctccctatacaaaggagctgctccttggtgacccagctctgtggtgtcacgagggtcctacctattccggggctgctcaatctgtggtcttattcacacatctttagcatctcctgagaacttgttaaaaatgcagagtcttgagccccaccccggacctacttactgaatctgcaactgtgagggggtgagactgaagaaactgtgcgttagcaagttgttctgctgattcttttgcacggtaaaatttgagaagcctacacagcccactctctcagcgtcttccagtgattttgcaagcaccatcgattcttgtattaagttcctgtctgcttaatatacctagaatggtccccacacggaactctggctgcctgtgtcaggattctagggttcaactagcagggtttgaattccagctcactgtttagtagccatgtgaccatgggcaagtgactttgtgtggcaaattgtaatttattccttcattttttccttccttccttctttccttccttcctccctcttctctccctccctcccttccttacttccctccttcctgtcttcctgtcttcttgccttcttcttttcttccttccttccttctttccttccctcctttcttttctctctctctttcttttctttctttccttcttttttttgagacagagtctcactctgttgcccaggctgaagtgcaatggcacgatctcagctcacttcaacctctgcctcccaggttcaagtgattctcctgcctcagcctcctgagtagctgggattacagttgcgtgccaccatacccagctaattttttgtgcctttagtagagacggggtttcaccatgttggccaggctggtattgaactcctgacctcgtgatccacccgcctcagcctctcaaagtgctgggattacaggtgtgagccaccgtgcccagtacattcccctcccctccccttacttcccctcccctccccttccgttcccttccctttcttttctcccacagtgtctcactctgtcactcaggctgtcgtgcagtggtgcaattacagctcagctcactgcagccttgacctccttggcctgctgagtagctggggttacagttgtgcaccaccacagcgagttattattattattattattattatgtattttttgtagagacagggttttgccatgttgcccaagctggattcaaactcctggactcaagtaatctgcccgccttggcctcccaaaattttgggattacaggagtgagccaccgcacctggccaaaaatttgtaatttctaaagatggccatggctctattactcaccctacgtgctcttctagaatcttgccactctaccatcaagagctggagtgtgggttgggcatggtggaacatgcctgtaatcccagcattttgggaggccaaggcgggtggatcacctgaggccaggagtttgagaccagcctggtcaacatggtgaaaccccatctctactaaaaatacaaaaattagctgggtgtggtggtgggtgcctgtaatcccagctactcaggaggctgaggcaagataattgcttgagcccaggaggcggagattgcagtgaaccaagatcatgccattgtactccagcctgggcgacaagggtgaaactctaacaaaacaaaacaaaacaaaataaaagagctggaggatggaccaagtgtggtggctcatgcctgtaatcccagcactttgggaggctgaggcaggagactagcctgggtgacaaagtgagaccctatctctaatgtctactaacaatacaaaaaaattaaccagctgtggtggcatgtgcctgtagtcctagtgactctggaggctgaggtgggaggattgcttgagcccaggagtttgaggtttcaatgaaccatgatcacaccactgcactctaccctgggtgacagagtgagatcctgtctcaaaaagaaaagagctggagtctgtacttcatccccttgaatctgaacaaggcttagtgactgccttgttggtgagtcctgaataagtgacactgtatgacttctgaagttaggtcataaaaatgcaatccgtttttttttgcatttacttctgtcctgctctcttggggtgtttgctctgggggaacctggcagccatgttgtgaggaagcccaaggggactatggagagacactaaggtctttgttctccttactcctgctgagcccccagctgataattggcaccacctggccagtctgttgtgagccaccttggaagtagatccctctacctctggctaagatgctctggctgatgtcatagggagcctaaatgaactgcctcgccaatccttgctcagattacagatttgggagcaaaataaatacctgtttttgtcttaagccactaagttttgggggattgttacacagcaaaagctaactgataatgctcttctctctctaaaccttggcttggaaggggatagaagcttaggccttccagggttggtgtgaggcttgcatgaaatgaggcatgagtcatgcacacagaaaagtttcatgtgggtgagctgtgttgttactctggcaagattgccacttgggtgccagctcaggctgccatcttcctggcacccttccctagagattccccttcctgccttccatatttgcaaggtgctgcacagagaacagcagtacctctgccaccaagcacccactctgtgctcctgagatctcctcagatcctcacgaacaattctgaggtgggtgtgtcagagacgtgtgaaccagaacaactccatcttgaataggagctgggtaaaatgaggctgagacctgagacctactgggctgcattcccagatggttaaggcattctaactcacaggatgagatcggcataagatacaggtcataaagaccttgctgataaaataggttgcagtaggccgggtgcggtggctcatgcctataatcccggcactttgggaggccgaggcgggtggatcgcgaggtcaggagatcaagactatcctggctaacacggtgaaaccccgtctctactaaaaatagaaaaaattagctggatgtggtggtgggcgcctgtagtcttagctactcgggaggctgaggcaggagaatggcgtgaacccgggaggtggagcctgcagtgagccgagatcatgccactgcactccagcctgggcgacagagtgagactctgtctcaaaaacgacaacaacaacaaagcaaaacaaaacaaaacaaacaaacaaacaaacaaaaaacaggttgcagtaaggaagctggtcaaaacccaccaaaaccaagatgatgatgagtgacctctggttgtcctcactgctacactcccaccagcgccatgacagtttacagatgccacggcaatgtcaggaagtcaccctacatgttctaaaaaggggaggcatgaataatccaccccttgtctagcatatcatcaagaaaaaaccataaaaatgggcaaccagtggctctcatctgtggagtagccattctttgttttttttttttttttttttttttttgatacggagtctcgctctgtcacccaggctggagtgcagtggcgccatctcagctgactgcaacctctgcctcccaggttcaagtgattctcctgcctcagcctcccaagtagccggaactataggcgcctgccaccacgcccaggtaatttttgcatttttagtagagttggggtttcaccatgttggtcaggctggtctctcctggcctcaggtgatccacccacctcagactcccaaagtgttgggattacaggcatgagccactgcacctggctcctttatttatttatttaattattattattttttgagacggagtgtcactctgttgccaggctggtgtgcagtggcgttatcttggctcactgcaacctctgcctcccaggttcaagcgattctcctgcctcagcctccggagtacctgggactacaggcgcccaccaccacgccctgcgaatttttttatttttagtagagatgggatttcgccatgttgaccaggctggtctctcctggcctcaggtgatccacctgcctcagcctcccaatgttgggattacaggtgtgagccaccgtgccctacccctttactttcttaataaacgtgcttttactttatggacttgccctgaattctttcttgagatccaagaaccctctcttggggtctggattgggaccccattcctataacagttgtggggggatcctgggggaaaacatacgatcccattttacaggtgggaagaccgaggctgagagaaggcaaatggcttagtcaaaacctcagggttagtgggtggcctagcctggcccgtctgatccctccccagcacgccccccatccagagatgagatgtcatcggtaccctcctccatcctgtagagaaaagcccgcacttgctgtaagagaggaaagagggattcggcagaaacatccatgacaacaattaatttatttattgagggtgaggcagggaagcggggagggagggtaggggtgacctctcttcctcacaggcaccaggccttgtttctctcccagataagctaaggtcggcaggggctgaggggagtgaggcagggaggatgcatggggcctgtgggaatcagagagaagctggggtcagaggtaggagctgacgctgtggggggtggggggtgaaaggtgaggcaaggtcaaaggtgaactgcagctcggagggaggggtccaatataaaccaggacttgcaggtgtagaagtaaaatgggactcatagagggtgaaagagaagttggagtcagaggggattcagagatcaaagagaagttggggtcagaggtaggagctggggctcaggtggggggttaaaggtgaggcaaggtcagcggtgaagtgcagctcagagggaggggtcaaacataaaccagaacttataggtctagaggtaaaatgggattcatggggggcagaggtcaaaggtgaagcagaagtcaggggtgaaggaaggtctgcaaagttaaaggtgcggtttccagagtcagaaggggtgaagcggggctcctcctgggaatgtcaaggttggaagagctcaagggggttaaagataaattagggctcaaaggggagccagggtcggagatgaagtagccagaggtaaagcgagctccaaaggtattgttagggtcagcggggagtcagccttggagggaaagcggggctctagggttcagagatggggggcctagcggatcaaaggtcagaagcctcgaggggacaggtgggaagcgatgggagcagcctaggccacctcctcctccgcctcctcctcgaactcgccctcctcggccgtggcgtcctggtactgctggtactcagataccaggtcattcatgttgctctcggcctcggtgaactccatctcgtccatgccctcgcccgtgtaccagtgcaagaaggccttgcgccggaacatggccgtgaactgctcggagatgcgcttgaacagctcctggatggccgtgctgttgccgatgaaggtcgcggccatcttcaggccgcggggcgggatgtcgcacacggccgtcttcacgttgttggggatccactccacgaagtagctgctgttcttgctctgcacgctcagcatctgctcgtccacctccttcatggacatgcggccccggaacacggcggccacggtcaggtagcggccgtggcgcgggtcgcacgccgccatcatgttcttggcatcgaacatctgctgggtgagctcgggcaccgtcagggcccggtactgctggctgccccggctggtcaggggtgcgaagccgggcatgaagaagtgcaggcgaggaaagggaaccatgttgacggccagcttgcgcaggtcggcgttcagctggcccgggaagcgcaggcaggtggtgaccccgctcatggtggccgacaccaggtggttgaggtccccgtaggtgggggtggtcagcttgagggtgcggaaacagatgtcgtagagtgcctcgttgtcgatgcagtaggtctcatccgtattctccaccagctggtgcacagacagcgtggcgttgtagggctccaccaccgtgtctgacactttgggcgagggcaccacgctgaaggtgttcatgatgcggtctgggaactcctcgcggatcttactgatgagcagcgtgcccattccggaccccgtgccaccccccagcgagtgggtcagctggaagccctgaaggcagtcgcagctctcggcctccttccggactacgtccaggacagcgtccaccagctctgcgccctccgtgtagtgcccctttgcccagttgttgccggctccggattggcctagagagggaaggggaggggacacacatgcagttatggggagccccaacccttgactctgtctctccaccacctggagggcctctagtagttgaat[174 bp omitted]tggtggcgggcgcctgtagtcctagctactcgggaggctgaggcaggagaatggcgtgaacccaggaggcggaacttgcagtgagccgacattgtgccactgcactgcagcctgggcaacagagcgagactccgtctcaaaataataataataataataataataaataataacaattatagccaggtgtgctggtgagcgatcgtagtccctggctactcgggaggctgaggcaagagaattgcttgaacctgggaggaggaggctgcaggtagccaagattgagccactgcattccagcctgggtgacggagtgagactccatctcaaaaacacacatacacacaaaacactcccccgccccctgcctaaaaaaaaaccaagactgggcacagtggctcatgcctgtaatcctaacactttgggaggcagaggtgggaggattgcttgagcccagcagttcaagactagcctgggcaacctagtgaggccatgtctctacaaaaaaaaaaaaaaaaaaaaaaaaaaaaaaatatatatatatatatatatatatatatatatatatatataaattagccagtcatggtggtggcacacctgtagtaccagttactaggggggctcaggtgggagattgcttgagcccaggagttggaggctgcagtgagctatgatcacaccattgcagcctgggagacagagcaagaccctgtctctaaaacaaataaataataacaataaaaagattaatatttaacatcattattaataataatatcattttcaggcagggtcttggtatgttgcccaggctggagtacagaggtgcaatcatggctcactgcagccttgacttcccaggttcaagtgatcctcctgccccagccttttgagtagctgggactacaggcttatgctaccagatctggctaatttttgtatcttttttttgtagaggtggggtttcgacatgttgcccaggctgttcttgaactcctgagctggagcaatccacctgccatggcctcctaaagtgctgggattacaggcgtgagccaccatgcttggcctgtgttttcttgttaatcatgtttattgtctgcaagctcactgtggaatgcaagctcccggaggaaaagaatcagtattagaatattggccaggcgcagtggctcatgcctgtaatccagcacttagggaggccgaggcgggcagattgcgaggttaggagatcgagaccatcctggctaacacagtgaaaccctgtctctactgaaaatacaaaaaattagccgggcgaggtggcgggcgcctgtagtcccagctactcgggaggctgagcctgcagtgagccgagatcgtgccactgcactccagcctgggcgacagcaagactccgtctcaaaaaaaaaaaaaaaaaaaaagaagaatattggccaggcgtggtggctcacgcttgtaaacccagcactttgggaggccgaggcgggcggatagcgaggtcaggagatcaagactatcccggctaacacggtgaaaccccgtctctactaaaaatagaaaaaattagctggatgtggtggtgggtgcctgtagtctcagctactcgggaggc[136 bp omitted]gccggtattactgtgaacagctaacgttttctttcacccctcatctgtctccaccttagttcagctccagcatcaccctcctggataagttcaattccctctgtcctggtcccctggctcctacccttatcacccagtctgtcctctccacagtacccacgagaggacacctgagagcaagtaagtcaggtcccgtccctcctctgcctacagccctccatggctcccacctaccttggggtcaaagcccaaatcctccctgcaggccacaaggccctgccggacctgccccatcccctccctcactctgcttcagccgcagctgttactccagctttccaggtgtggtcctgccctggggcctttgcactagtggcttggctgcttagaatgctttccccccaggtattcacctgactttttcctcacttccttcaggtctcagctcaatgccacatcctcagagaagccacctctggtcaccccctccctcctcctcccgagcctggtggtttagactgcagattctcgggactgacaagacaaactgtgtgaccttggacaagtgacttcccctttctgatctgttggaagatttcaaaacataatgatgcagttttgtggccgtggcccatcataggtccttgggaaatggctgggtgaaatcaagatgaaatgagattggccaaatggtgtgagtgatttcaggaggaccagagggcttacagttgggccaagagattctatggcctctgggtggccagggggtgggaggagcattaaaagtgtgggctcagaccaggcgcggttgctcatgcctgtaatcccagcactttgggaagcagaggcaggcagatcacctgagaggtcaggaataggagaccagcctggccaacatggcgaaaccccgtcactattaaaaatacaaaaaattagctaggtgtggtgatgcatgcctgtagtcccagctactcgtgaggcaggagaatcgcttgaatctgggaggtggaggttgcgtcactgcactccagcctgggcaacggagactccgtctcaaaaaaaaaaaaaagcgtggacctagtagtcagaccctctcctctggctcctgacagccccagtggcttgcagtgtgactttctgcaagtgacctaacgtctctgtgcctctgttttctcacctgtaaaatggaagtaagaggcgagttgcggaaaagattcagagaggcaggacaggtcctgcatttagcacgtcttacatgctgggagtattggaggcgggtggagccagggtggggacatgcagccagctggagccaggaaagctttcccggaaggattgtcccagggtgtggacaccccactatcttcacatatgctgttgcctccgtcttaaacatctttcctcccttccatgccctttggccagtccaaatcctactcacattctagactgcagatagtaatgaaaacaacgacaaatgcttatttacctctttctctgtgtcaggcattgttctaaactctacacatattcatgactttaagcttcacaatttttttttttttttggagacgaagtttcactcttgttgcccacgctggggtgcagtgtcatgatcttggctcaccacaacctctgccgttcaagcaattctcttgcctcagcctcccgagtagctgggattacaggcatgtgccaccatgcctggctaattttttatttttagtaga[143 bp omitted]aatccctgttttatttgatcttttttagagatggggtctcacaccatcgctcaggctggagtgcagtggcaccatcatagctcatggcagcctcaacctcccaggctcaagtgattctcctaccttagcctcacgagtagctgtgactacaggtgcacaccacctcactcagctaattaaaatttttttctttttgtagagacagggtctcaccatggtgcccaggctggtctcgaactcctgacctcaagctctcttcctgactcagcctcccaaagtcctgggtttataggcatgaaccaccatgcccagtgaaatccctgttttaaagacgaggaggccgggcaaggtggctcatgcttgtaatccagcactttgggagctgagttgggtggatcgtttgagtcccggagtttgagaccagcatgggcaacatagagagacccacctctctacaaagaaaactaaaaaattagctgggtgtggtggtgcatgcctgtaggtccagctacttgggagactgaggcaagaggatcacgtgtgcccagaggtggaggtgacagtgagccgtgatcatgccactgcactctagcctgggtgacagcaggacagacagaccctgtctgaaaaaaaaaaaaaaaagaggatttttgaggcccagaaaggctgaggagcccatcctaagttatccatctgaatcaacccctggcagagctttacttatttatctcctttgtggcctatcaccttctaccagaatgggagctgcactggggcagagagggagctccggctgtttgattcttacctggatctccagcttctagaacagggcctggtatgcagtgagtgctcactgtttgttgaatgcatgaagtggcagaattgggatgtgcacccaggcagtctggttccggttcagaccgttgaattaaaatgccacctcctccaggaagacttccctgaatccttctctgtatccgccctcctcagggctctcacagtggcctgagcatcccctcatcacagccctggatgcagggctggtgcctggtgccctgtccaccccatctctggtctgtgggccccggtggtggctgttgactctgtggtgttagcaggaataaggaggttttccagcctctggctccctgctgggggactcaccaaacacgaagttgtccggccgaaagatctgaccgaaggggccagaacggacagagtccatggtgccgggttccaggtccaccagcaccgctctggggacataatttcctcctgcagggaaacagatggagggcagttcgatgcgtgccaggaaccacaggcgcccggtagcatcctgttccctcccagctgccccttcccacctggaaggtgcctccttcgccctacctgtggcctcgttgtagtacacgttgatcctctccagttgcaggtcactgtccccatggtatgtgcctgtggggtcgatgccatgttcgtcactgataacctcccaaaactagagagagaggtggtcggaagagttgagagaggggaagccggtggccaagccgaggactgcccccagcccccaactagctccctagctgccacctctcccccagcaaggtgaacgggggacctagaggcatggtgtcggggcgaggatgaggcagcaagaaggagcggtgggggcggggtgcagccgagtcagcacccagcggggccggctggtgccagcgcacccaggctgcagcccgggggaggcaccggggctctttgtgcgtgaggaggggacagtggcccagctgtgggcccagctgtgacaggcggacagaaggctggctcccactctccgcagcctctttgttcccagtctggccctgccacccccaccccgcgacccttcccccaaggcccctggggcgcgctggcctcctggggacctcattcctttccaaagactcccaggttgcggggtgctccggggaccgaccccgcggtgctccccggggccgccactgcctccccgggccccgttccccgagcaccttggccccgatctggttgccgcactggccggcctgcaggtgcacgatctcccgcatggcggtggcgctgagggtggacgcggcggcggtggcacgagcgcggggagctgcggcggcggcgagggtggaagatgcggcggagacggcggagcacggtccctgcgcccccgggagccgctatatgagcgggcggggcacgcgtcacggccggtcaccctcccgctccgccccttggtcccgccccgggatgatggagggggctggggtggggggaggtggtgcagggacctccctccccagggggcctcccagagaagtccgggacgccacgtgctccgacccctgccttgggggtgaggccccttagggagccaccagtgcagtctcccccgtcccagcccccagccaggcttggccacccgcagaaattgggcggaggaagggaggggagcgcctggtaaacaggcatctgagaagtcctgcccctcccccttagcctccaccctcccgccccaggccttgcctcagtttctcggtccgcagccccccttctcattctatttagacctcattcgccagaatccttgcagtaaccgcgagccctcccagtgggctgggggctccggagcggcgatctggtttgcgggtggggggcggtaggttcctggagggcttgtcctgaagctgcatagtaaaaccacgattttcctcccatgattgggtgcagatgctggtgggctcccctggtacacctctactgggcattgagctcgtcccaggtggggtcacccccagcctggcctaaggaggagagtggaggagtaagacagctgggttcatattgggagggggacagtgagtccccagggctgcctcgctttcccaaaataacacccctcctctccagtattgtaatttatctttatctatatctatacccttttttttttttttttgagacagagtttcgctcttggcgcccaggctggagtgcaatggcccaatctcggctcactacaacctcagcctcccaggtccaagcgattctcctgcctcagcctcccgagtagctgggattacaggcatgtgccaccacgcccggctaatttttttgtatttttagtagagacaaagtttctccatg[135 bp omitted]ctcaggctgtagtgcagtggcatgctcatagctcactgcagcctcaatgtcctgggctcaagcaatcctctcacctcagcctcccaagtagctgggactgcaggtgcatgccatcacgcctggctaattttcaagattttttgtagagatggggtctcgctatgttgtccaggctgctctccaactcctgagctcaagagatcctcctgcctcagcctcccaaagtgctgggattccaggcatgagccactgcgcccagctcagtattataatttattacccaccatctcccttgcctctgcatttcctgtagcattaggtgtatgaccttgccctggtgctcctctctgtgtctgaatttcacatttgcaagttggggtggtgaggaaggcccaccctccagggtctgattatgcgatgacccagttaacaaggtggcgatagtctcccctcctgcagagtcaacaataaattgtatctttctcgagtctaagtattatcagaggctggactggacttcctgtgctgcccctcatgtgaaggtcaagcctcctggggctgcttccttggacagcctccagtcccgccctcccaggaagtctcctcctcgcctcccatccttgactttcccactcaaggactttggtgtattgctggtgggaggtggggtaagccatcttggccatgtggttgggacctcacatttgccatggccactaattttttttttttttttttttttttgacagagtcttgctctgtcacccaggctggagtgcagtggtgccatctcggctcactgcaacctctgcctcctgggttcaagccattctcctggctcagccgccccagtagctgagattacaggtacgtaccaccatgaccagctaatttttgtatttttagtagagacgggctttcaccatgttagccaggctggtctcgaactcctgacctcgtgacctgcccaccttggcctcccaaagtgctgggattacaggcgcgagccaccgcgcccagcaaattctttttttttaatttcttgccctgtcatccaggctggggtgcagtggcatggccatggctcactgcagcctcgaactcctgggctcaagtgattctcccacctcagcctcccgagtagctgggactacaggcatgcaccaatatgcctgggtaatttttgtatttttttgtggagatgggggtcttgctatgttgcccaggctggtctccaacgcctgagctcaagcaatcctcccacctcagcctcccaaagtgctgggtttacacatgtgagccatcgtgccctgcccaatgaccactaaatttgaccagtggctctcaacagcgtgtgtgtgagagtgtgtgtgtgtgtgtgtgtgtgtgtgtgtgtgtgtcgggggggcgggggagcggtgatattgccttcccagggaacacttggcaatatctgaagacatttttggttgtcgtacccagatgggggcggggatgtgtgtgtgagactatgtgtgcactactggcatctagtgggtggaggccagagatgctgctgaaagcccttcagtgcacaggacggccccaccccagagaatgatgcaggcccaatgtcaacagggttgaggctgagaaatcctgtgttaattattttgggaaaaaatttgtgttagccccttcgctcacactagatgccagaataaattccagaggggctagaccttatatgggtttggtggggcgatcccttagcttctgtgacttatatactctctctccctcaactcagttagtatgtgtgtatgtatgtttttatctttttagcaagctatttttttttttgagatggagtttcgctcttcttgcccaggctggagtgcagtggtgcaatctctgctcatctcaacctccgcctcttgggttcaagcgattctcctgcctcggcctcccgagtagctgggattacaggcatgcactgccacgcccggctaattttgtatttttagtagagacagggtttctccatgttggtcaggctggtcttgaactcccgacctcaggtgattcccctcaccttggcctcccaaagtgctgagattacaggcgtgagccactgcacccggccgccatttttttttttttttttgagacagtttcaccctgttgcacaggctggagtacagtggtgtgatcatatctcactgcagccttgacctcccaggctctggtgatcctcccacgtcagcctcctgagtagctgggactacaggtgggcaccaccaggcctggctaatttttgcattttttgtagagacagggtctcgctatgttgcccaggctggtctcaaactcctgggctcaagtggtcctccttcctgtcaggcctctgagcccaagctaagccattgtaacccctatgacctgctcgtatacatccagatggcctgaagcaactgaagatccacaaaaaaagtgaaaatagccttaactgatgacattccaccattgtgatttgttgcggccccaccctaactgatcaatgtactttgtaatctcccccacccttaagaaggttctttgtaattctccccactctcaagaatgtactttgtgagatccacccctgcccccaacacattgctcctaactccaccgcctctcccaaaacctataagaaccaatgataatcccaccaccctttgctgactcctttttcccactcagcccgcctgcacccaggtgaaataaacagccttgttgctcacacaaagcctgtttggtggcctcttcacacggacacgtgagacactgccttggccttccaaggtgctgggattataggtgtgagccactgcgcctggccagcaaatgattttttatttactcgcatagtatagctccaataggaaagtaatttggcttagcactctttacagctccagcacaatcttgaaggcatcc[187 bp omitted]gggtgtggtggtgggcgcctgtagtcccagctactcaggaggctgagg[131 bp omitted]tccccacctatacttcttttttttttggagacggagttttgctcttgtcgtccaggctggagtgcagtggcacgatctcaactcactgcaacctctaactccggggttcaagtgattctcctgcctcagcctcctgagtagctgagattacaggtgtgcaccaccaccctcagcaaatttttgtattattggtagggacagggtttcaccatgttggccaggctgatcgcaagctcctgacctcaggtgatccactcgcctcggcctcccaaagtgttgggattacaggcgtgagccaccacgcctggcccctatgcttcttttttcttttttatttttttgagacggagtttcgctcttgttgcccaggctggagtgtaatggtgcgatctccggctcaccgcaacctctgcctcccaggttcaagggattctcttgcctcagcctcctgagtagctgggattacaggcatgtgccaacacacctggctaattttgtatttttagtagagacggggtttctccatgttggtcagggtggtctcgaactcccaacctcaggtgatccactagcctcagcctcccagagtgctgggatttcaggcgtgagccaccgcacccggccgcggcccctgtgcttcttatcttgctcacgaatatctgaaagtttgaagattcttccagctttaaaagcagttatgtgggctgggcgtggtggctcatgcctgtaatcccagcactttgggaggttgaggcaggtagatcactgaagaccaggtgtttaaggctgccctggccaacatggcgaaacccctgtctttactaaaaatacaaaaagtagctgggcatgatggtgcgcacacttgcagtcccagctactcaggaggctgaggcatgagaatcacttgaacccagaaggcagaggttacagtgagctgagattgtaccactgcactccagcctgggtgacagagagaccctctctccaaaaagaaaaaaaaaaattgatctctctttctgaggtccataaaaccaggaaaaggcctgcctccttgttggtgtgatctgcctgtcatctggggctggggcaacgtttccaccctctctgtgagcctcgagaaattgttgacatacaccccagctcctcatcctccccgaggggacagagagggcccactctgcctattattaataataatagtgctgtgtagaccagatctatggccagatcttgttttcaagtgcttgctgtgtcagcttgtgtgtgtgtgtgtgtgtatatatatgtgtgtgtgtatatatatatgtgtgtatatatatatgtgtgtgtatatatatataattatttttttaggtggagtctcactctgtctcccaggctgcagtgcagtggccctatctcagcttattgcaacctccaccttggcctcccagtgctgggattacaggcatgagccactgcacctggccttgtttatattttacttatttatttactttttgagacagagtctcactgtgtcacccaggctggagtgcagtggcctgatctcggctcatcacaacctccacctcccgggttcaagtggttctcctgcctcagcctcctgagtagctggaactacaggcgcccaccaccacgcccggctaatttttgtattcttagtagagatggggcttcgccatgttggccaggctggtctgccaatgtgctgggattacaagcgtgagccatggcacctggccagcttgtttatatttttagctgatgaaaccacaacctaggaggtagttgctgttctatgcctattctacagatgagaaaatggaggcctaaggaagttgagtatctcacctgactgtcccatactgttgaggctgggaatagagtcaaaagagccccgcattccaggtccaaagaccctgctctttatcgctacaggatgttggagttactttgttatttgactttttttgttttgttttttgttttgaggcagagtcttgctctgtcacccaggctggagtgcagtggcatgatcttggctcactacaacctctgcctctgggttcaagtgattctcctgcctcagcctcctgagtacctgggattacagatgcacactaccacacccggctcatttttgtacttttagtagagacggggtttcaccatgttggccatcacaccaggctagtctcaaactcctcacctcaggtgatctgcccaccttggcctcccaaattactgggattacagacgtgagccaccatgcccatccagttatttgatcttaaaaaaaaaaaagaggcggggtacagtggctcatgcctgtaatccaagcacttcgggaggccaaggtacgtggattgcttgagcccaggagtttgagaccagcctgcccaacatggtgaaaccccgtctgtactgaaaatacaagaattagccgggcatgatggcaggtgcctgtaatcctagctactagggaggctgaggcaggagaattgctttaacccgtgaggcggaggttgcagtgagctgagattgcgccactgcactccagtctgggtgtcagagcgagactctgtgtcaaaagaaaaaaaaaacaaaaaaacccaaaaggctggcaatccagtgagttgtctttcaggaggaaaatgttgctggtgttgaggcagccgtgtgactgtcacgtgctccgtggcctgggcctctccgtgtcatgtgtctgcccaccacggtgcccggtgttcccggctggctctgatgtgtgctgtcagcttccagcatcggaatgtatgctgtctttgtgtacttggcctgtgggtcactggcccttttcccaaggtccttgccaccccttctccccggcccctccttccacctccccacccagacggtagagtctgatttccttttcctctgccagggtggagcccagccctgggcattgacacagccagcatgggccctctccagctagaggcagcgggagacagagggttggaacggttactgttctgagacagggatgctgaatgagtcttaagagaagccctcccaactccagggacacacacaagctctgtggaagccgtgcctggcactgttgggaccaattatggggtggggggtgctggaaggggtggggagggggacaatggagcattctctggccttgctgggcctactgccaccagataccccatgcagtacatcccgaagaaggcatgttcagaatagaaggatttcctagtggctcacacgggtaatcactttaagaggccaagcagggaagatcgcttgaggccaggagttcaagaccagcctgggcaacaaagtgagactctgtccctaatttaaaataattaagtaaataaactagaaggatttcctgagccaggtgtgttggcttatgtctgtaatcccagcactttgggagactgaggcaggaggatcacttgaggccaggaattcaagaccagcctgggcaacaaagccagataccatctctattaaaacaaacaaacaaacaaacaacaacaacaaaaaaaaaaccataaaaaaatagggccaggtgccgtggctcacacctgtaatcccagcactttgggagggcgaagtgggcggatcacctgaggtcaggagttcgagaccagcttggccaacacagtgaaaccccgtctctactaaaaatgcaaaaaattagctgggcatggtggcaggcacctgtagtcccaggtacttgggaggctgaggcttgagaatcacttggacctgggcaggggaagttgtagtgagccaagattgcaccactgcactccagcttgggagacagagcaagactccatctcaaaagaaaaagaaaaagaaaagaaataataatagaaggatttcctgggagatggggagggaggagtgttgacatcagctagggctggggctggaatggggaggggacactttctgaactcctcttccctacccaccccattgcctagcagtgaggacctcgtctgggcacccggtgcaggtgtagctggtgtgcagttgctctcacagtttaaggaggccggatgtggcaggcacatggtcagaaagtggggctgcaggctatccatggtcatcttggagattctggtcagggaggagctgaccatgtcaccagagatgaaggtgccccgctgctcgtaaaccatgaccctgtagattttaccgttgaaggccagcaagctcggctgcaggttctgattgtgaaagaaaaatcaatcttggggctcctaaatcactaaactaaaggaaaaagtcaagctggcaactgcttagggcaaacctgcctcccattctattcaaagtcacccctctggccaggcagcgtggtggctcatgcctataatcccagcactttgggaggctgaggctggtggttagccgggcctggtggtgcatgcctgtaatctcagctacttgggaggctgaggcaggagaatcacttgaacccgggtggtggaggttgcagtgagccaagatcatgccattacactccagcctgggtgacaagagggaaagtccctctcaaaaaacaaaaaacaagggccgggcgcggtggctcatgcctataatcctagcactttgggaggc[136 bp omitted]gaggcaagagaatggcgtgaacccagaaggcggagcttgcagtgagcagagatcacgccactgcactccagcctgggctacagagtaagactccgtctcaaaaaaaaaaaaaaaaaccccacaaaaaacaaaaaacaacaagaacaaagtccccacctgctcactgagatacctgcatatctgattggcctctttggagaggctaatcagaaactcaaaagaattcaagcatttgtctcttatctacctatgacctggaagacccttccctgtttccagttgtccctcctttccagaccgaaccaatgttcatcttgcatatgttgatctcatgtctccctaaaatgtataaaaccaagctgtgctctgaccacccttgggcacatgtcatcaggatctcctgagactgtgtcacatatacgtgt[136 bp omitted]catggcgaaacctcatctctactaaaaatacaaaaattagccaggtgtggtggcacatgcctgtaatcccatctactcaggaggctgaggcaggagaattgcttgaattcaagaggcggaggttgcagtgagctgagatcgcaccactgcactctagcctggggaatagagtgagactccgtctcaaaaaaaaaagaaaagtaaaaaataaaaaactaaattcactgagacccgcctctgatatttggggttcacatggacatgaatcatctctcccaggctgatctgcagggctctgtaactgcccagtgggttcactttgtcccctgcccagatagaatggatgtatcaagacaggagaattgcaacaaagagtttaattcatgcagagctggatgaacgggagactggagttttattttaattaattaattaattaatgtatttatccatctatcttgagttaagttcttgctctgttgcccaggctggagtgcagtggcaggatgataagttactgcagactccaactccctggctcaagtgatcctcccacctcagcctcctaggtagcgtgtgtggcttatgtctgtggtcccgctactctggaggctgaggcatgagaatcacttgaacccaggaggtggaggttgcagcgagccgagattgtgctactgcactccagcctgagtgagactcctt[141 bp omitted]aaaccccctctctactaaaaataaaaatacaaaaaaaaaaaaaaaattagccgggcatggcggcatgcgcctgtagtcccagctgctggggaggccgaggcaggagaatggcatgaacccgggaggc
